United States Patent Application Publication US 2026/0258408 A1, published September 3, 2026 (application 18/846,684).

The application's sequence listing, which the Patent Office published only in electronic form, follows.

SEQUENCE LISTING (570 sequences)

SEQ ID NO: 1 - RNA, 19 nt, synthetic construct
  source 1..19: mol_type = other RNA
agtctacaaaccagttgac

SEQ ID NO: 2 - RNA, 19 nt, synthetic construct
  source 1..19: mol_type = other RNA
gtcaactggtttgtagact

SEQ ID NO: 3 - RNA, 19 nt, synthetic construct
  source 1..19: mol_type = other RNA
aagtgtggctcattaggca

SEQ ID NO: 4 - RNA, 19 nt, synthetic construct
  source 1..19: mol_type = other RNA
tgcctaatgagccacactt

SEQ ID NO: 5 - RNA, 19 nt, synthetic construct
  source 1..19: mol_type = other RNA
agatcacgctgggacgtac

SEQ ID NO: 6 - RNA, 19 nt, synthetic construct
  source 1..19: mol_type = other RNA
gtacgtcccagcgtgatct

SEQ ID NO: 7 - RNA, 19 nt, synthetic construct
  source 1..19: mol_type = other RNA
agtccaagatcggctccaa

SEQ ID NO: 8 - RNA, 19 nt, synthetic construct
  source 1..19: mol_type = other RNA
ttggagccgatcttggact

SEQ ID NO: 9 - RNA, 19 nt, synthetic construct
  source 1..19: mol_type = other RNA
caaatagtctacaaaccaa

SEQ ID NO: 10 - RNA, 19 nt, synthetic construct
  source 1..19: mol_type = other RNA
ttggtttgtagactatttg

SEQ ID NO: 11 - RNA, 21 nt, synthetic construct
  source 1..21: mol_type = other RNA
  modified_base 1: mod_base = OTHER; note = 2'O-methyl-nucleotide phosphorothioate
  modified_base 2: mod_base = OTHER; note = 2'O-methyl-nucleotide phosphorothioate
  modified_base 3: mod_base = OTHER; note = 2'fluoro-nucleotide
  modified_base 4: mod_base = OTHER; note = 2'O-methyl-nucleotide
  modified_base 5: mod_base = OTHER; note = 2'fluoro-nucleotide
  modified_base 6: mod_base = OTHER; note = 2'O-methyl-nucleotide
  modified_base 7: mod_base = OTHER; note = 2'fluoro-nucleotide
  modified_base 8: mod_base = OTHER; note = 2'O-methyl-nucleotide
  modified_base 9: mod_base = OTHER; note = 2'fluoro-nucleotide
  modified_base 10: mod_base = OTHER; note = 2'O-methyl-nucleotide
  modified_base 11: mod_base = OTHER; note = 2'fluoro-nucleotide
  modified_base 12: mod_base = OTHER; note = 2'O-methyl-nucleotide
  modified_base 13: mod_base = OTHER; note = 2'fluoro-nucleotide
  modified_base 14: mod_base = OTHER; note = 2'O-methyl-nucleotide
  modified_base 15: mod_base = OTHER; note = 2'fluoro-nucleotide
  modified_base 16: mod_base = OTHER; note = 2'O-methyl-nucleotide
  modified_base 17: mod_base = OTHER; note = 2'fluoro-nucleotide
  modified_base 18: mod_base = OTHER; note = 2'O-methyl-nucleotide
  modified_base 19: mod_base = OTHER; note = 2'fluoro-nucleotide phosphorothioate
  modified_base 20: mod_base = OTHER; note = 2'O-methyl-nucleotide phosphorothioate
  modified_base 21: mod_base = OTHER; note = 2'O-methyl-nucleotide
agtctacaaaccagttgaatt

SEQ ID NO: 12 - RNA, 21 nt, synthetic construct
  source 1..21: mol_type = other RNA
  modified_base 1: mod_base = OTHER; note = 2'fluoro-nucleotide phosphorothioate
  modified_base 2: mod_base = OTHER; note = 2'fluoro-nucleotide phosphorothioate
  modified_base 3: mod_base = OTHER; note = 2'O-methyl-nucleotide
  modified_base 4: mod_base = OTHER; note = 2'fluoro-nucleotide
  modified_base 5: mod_base = OTHER; note = 2'O-methyl-nucleotide
  modified_base 6: mod_base = OTHER; note = 2'fluoro-nucleotide
  modified_base 7: mod_base = OTHER; note = 2'O-methyl-nucleotide
  modified_base 8: mod_base = OTHER; note = 2'fluoro-nucleotide
  modified_base 9: mod_base = OTHER; note = 2'O-methyl-nucleotide
  modified_base 10: mod_base = OTHER; note = 2'fluoro-nucleotide
  modified_base 11: mod_base = OTHER; note = 2'O-methyl-nucleotide
  modified_base 12: mod_base = OTHER; note = 2'fluoro-nucleotide
  modified_base 13: mod_base = OTHER; note = 2'O-methyl-nucleotide
  modified_base 14: mod_base = OTHER; note = 2'fluoro-nucleotide
  modified_base 15: mod_base = OTHER; note = 2'O-methyl-nucleotide
  modified_base 16: mod_base = OTHER; note = 2'fluoro-nucleotide
  modified_base 17: mod_base = OTHER; note = 2'O-methyl-nucleotide
  modified_base 18: mod_base = OTHER; note = 2'fluoro-nucleotide
  modified_base 19: mod_base = OTHER; note = 2'O-methyl-nucleotide phosphorothioate
  modified_base 20: mod_base = OTHER; note = 2'O-methyl-nucleotide phosphorothioate
  modified_base 21: mod_base = OTHER; note = 2'O-methyl-nucleotide
ttcaactggtttgtagacttt

SEQ ID NO: 13 - RNA, 21 nt, synthetic construct
  source 1..21: mol_type = other RNA
  modified_base 1: mod_base = OTHER; note = 2'O-methyl-nucleotide phosphorothioate
  modified_base 2: mod_base = OTHER; note = 2'O-methyl-nucleotide phosphorothioate
  modified_base 3: mod_base = OTHER; note = 2'fluoro-nucleotide
  modified_base 4: mod_base = OTHER; note = 2'O-methyl-nucleotide
  modified_base 5: mod_base = OTHER; note = 2'fluoro-nucleotide
  modified_base 6: mod_base = OTHER; note = 2'O-methyl-nucleotide
  modified_base 7: mod_base = OTHER; note = 2'fluoro-nucleotide
  modified_base 8: mod_base = OTHER; note = 2'O-methyl-nucleotide
  modified_base 9: mod_base = OTHER; note = 2'fluoro-nucleotide
  modified_base 10: mod_base = OTHER; note = 2'O-methyl-nucleotide
  modified_base 11: mod_base = OTHER; note = 2'fluoro-nucleotide
  modified_base 12: mod_base = OTHER; note = 2'O-methyl-nucleotide
  modified_base 13: mod_base = OTHER; note = 2'fluoro-nucleotide
  modified_base 14: mod_base = OTHER; note = 2'O-methyl-nucleotide
  modified_base 15: mod_base = OTHER; note = 2'fluoro-nucleotide
  modified_base 16: mod_base = OTHER; note = 2'O-methyl-nucleotide
  modified_base 17: mod_base = OTHER; note = 2'fluoro-nucleotide
  modified_base 18: mod_base = OTHER; note = 2'O-methyl-nucleotide
  modified_base 19: mod_base = OTHER; note = 2'fluoro-nucleotide phosphorothioate
  modified_base 20: mod_base = OTHER; note = 2'O-methyl-nucleotide phosphorothioate
  modified_base 21: mod_base = OTHER; note = 2'O-methyl-nucleotide
aagtgtggctcattaggcatt

SEQ ID NO: 14 - RNA, 21 nt, synthetic construct
  source 1..21: mol_type = other RNA
  modified_base 1: mod_base = OTHER; note = 2'fluoro-nucleotide phosphorothioate
  modified_base 2: mod_base = OTHER; note = 2'fluoro-nucleotide phosphorothioate
  modified_base 3: mod_base = OTHER; note = 2'O-methyl-nucleotide
  modified_base 4: mod_base = OTHER; note = 2'fluoro-nucleotide
  modified_base 5: mod_base = OTHER; note = 2'O-methyl-nucleotide
  modified_base 6: mod_base = OTHER; note = 2'fluoro-nucleotide
  modified_base 7: mod_base = OTHER; note = 2'O-methyl-nucleotide
  modified_base 8: mod_base = OTHER; note = 2'fluoro-nucleotide
  modified_base 9: mod_base = OTHER; note = 2'O-methyl-nucleotide
  modified_base 10: mod_base = OTHER; note = 2'fluoro-nucleotide
  modified_base 11: mod_base = OTHER; note = 2'O-methyl-nucleotide
  modified_base 12: mod_base = OTHER; note = 2'fluoro-nucleotide
  modified_base 13: mod_base = OTHER; note = 2'O-methyl-nucleotide
  modified_base 14: mod_base = OTHER; note = 2'fluoro-nucleotide
  modified_base 15: mod_base = OTHER; note = 2'O-methyl-nucleotide
  modified_base 16: mod_base = OTHER; note = 2'fluoro-nucleotide
  modified_base 17: mod_base = OTHER; note = 2'O-methyl-nucleotide
  modified_base 18: mod_base = OTHER; note = 2'fluoro-nucleotide
  modified_base 19: mod_base = OTHER; note = 2'O-methyl-nucleotide phosphorothioate
  modified_base 20: mod_base = OTHER; note = 2'O-methyl-nucleotide phosphorothioate
  modified_base 21: mod_base = OTHER; note = 2'O-methyl-nucleotide
tgcctaatgagccacactttt

SEQ ID NO: 15 - RNA, 21 nt, synthetic construct
  source 1..21: mol_type = other RNA
  modified_base 1: mod_base = OTHER; note = 2'O-methyl-nucleotide phosphorothioate
  modified_base 2: mod_base = OTHER; note = 2'O-methyl-nucleotide phosphorothioate
  modified_base 3: mod_base = OTHER; note = 2'fluoro-nucleotide
  modified_base 4: mod_base = OTHER; note = 2'O-methyl-nucleotide
  modified_base 5: mod_base = OTHER; note = 2'fluoro-nucleotide
  modified_base 6: mod_base = OTHER; note = 2'O-methyl-nucleotide
  modified_base 7: mod_base = OTHER; note = 2'fluoro-nucleotide
  modified_base 8: mod_base = OTHER; note = 2'O-methyl-nucleotide
  modified_base 9: mod_base = OTHER; note = 2'fluoro-nucleotide
  modified_base 10: mod_base = OTHER; note = 2'O-methyl-nucleotide
  modified_base 11: mod_base = OTHER; note = 2'fluoro-nucleotide
  modified_base 12: mod_base = OTHER; note = 2'O-methyl-nucleotide
  modified_base 13: mod_base = OTHER; note = 2'fluoro-nucleotide
  modified_base 14: mod_base = OTHER; note = 2'O-methyl-nucleotide
  modified_base 15: mod_base = OTHER; note = 2'fluoro-nucleotide
  modified_base 16: mod_base = OTHER; note = 2'O-methyl-nucleotide
  modified_base 17: mod_base = OTHER; note = 2'fluoro-nucleotide
  modified_base 18: mod_base = OTHER; note = 2'O-methyl-nucleotide
  modified_base 19: mod_base = OTHER; note = 2'fluoro-nucleotide phosphorothioate
  modified_base 20: mod_base = OTHER; note = 2'O-methyl-nucleotide phosphorothioate
  modified_base 21: mod_base = OTHER; note = 2'O-methyl-nucleotide
agatcacgctgggacgtaatt

SEQ ID NO: 16 - RNA, 21 nt, synthetic construct
  source 1..21: mol_type = other RNA
  modified_base 1: mod_base = OTHER; note = 2'fluoro-nucleotide phosphorothioate
  modified_base 2: mod_base = OTHER; note = 2'fluoro-nucleotide phosphorothioate
  modified_base 3: mod_base = OTHER; note = 2'O-methyl-nucleotide
  modified_base 4: mod_base = OTHER; note = 2'fluoro-nucleotide
  modified_base 5: mod_base = OTHER; note = 2'O-methyl-nucleotide
  modified_base 6: mod_base = OTHER; note = 2'fluoro-nucleotide
  modified_base 7: mod_base = OTHER; note = 2'O-methyl-nucleotide
  modified_base 8: mod_base = OTHER; note = 2'fluoro-nucleotide
  modified_base 9: mod_base = OTHER; note = 2'O-methyl-nucleotide
  modified_base 10: mod_base = OTHER; note = 2'fluoro-nucleotide
  modified_base 11: mod_base = OTHER; note = 2'O-methyl-nucleotide
  modified_base 12: mod_base = OTHER; note = 2'fluoro-nucleotide
  modified_base 13: mod_base = OTHER; note = 2'O-methyl-nucleotide
  modified_base 14: mod_base = OTHER; note = 2'fluoro-nucleotide
  modified_base 15: mod_base = OTHER; note = 2'O-methyl-nucleotide
  modified_base 16: mod_base = OTHER; note = 2'fluoro-nucleotide
  modified_base 17: mod_base = OTHER; note = 2'O-methyl-nucleotide
  modified_base 18: mod_base = OTHER; note = 2'fluoro-nucleotide
  modified_base 19: mod_base = OTHER; note = 2'O-methyl-nucleotide phosphorothioate
  modified_base 20: mod_base = OTHER; note = 2'O-methyl-nucleotide phosphorothioate
  modified_base 21: mod_base = OTHER; note = 2'O-methyl-nucleotide
ttacgtcccagcgtgatcttt

SEQ ID NO: 17 - RNA, 21 nt, synthetic construct
  source 1..21: mol_type = other RNA
  modified_base 1: mod_base = OTHER; note = 2'O-methyl-nucleotide phosphorothioate
  modified_base 2: mod_base = OTHER; note = 2'O-methyl-nucleotide phosphorothioate
  modified_base 3: mod_base = OTHER; note = 2'fluoro-nucleotide
  modified_base 4: mod_base = OTHER; note = 2'O-methyl-nucleotide
  modified_base 5: mod_base = OTHER; note = 2'fluoro-nucleotide
  modified_base 6: mod_base = OTHER; note = 2'O-methyl-nucleotide
  modified_base 7: mod_base = OTHER; note = 2'fluoro-nucleotide
  modified_base 8: mod_base = OTHER; note = 2'O-methyl-nucleotide
  modified_base 9: mod_base = OTHER; note = 2'fluoro-nucleotide
  modified_base 10: mod_base = OTHER; note = 2'O-methyl-nucleotide
  modified_base 11: mod_base = OTHER; note = 2'fluoro-nucleotide
  modified_base 12: mod_base = OTHER; note = 2'O-methyl-nucleotide
  modified_base 13: mod_base = OTHER; note = 2'fluoro-nucleotide
  modified_base 14: mod_base = OTHER; note = 2'O-methyl-nucleotide
  modified_base 15: mod_base = OTHER; note = 2'fluoro-nucleotide
  modified_base 16: mod_base = OTHER; note = 2'O-methyl-nucleotide
  modified_base 17: mod_base = OTHER; note = 2'fluoro-nucleotide
  modified_base 18: mod_base = OTHER; note = 2'O-methyl-nucleotide
  modified_base 19: mod_base = OTHER; note = 2'fluoro-nucleotide phosphorothioate
  modified_base 20: mod_base = OTHER; note = 2'O-methyl-nucleotide phosphorothioate
  modified_base 21: mod_base = OTHER; note = 2'O-methyl-nucleotide
agtccaagatcggctccaatt

SEQ ID NO: 18 - RNA, 21 nt, synthetic construct
  source 1..21: mol_type = other RNA
  modified_base 1: mod_base = OTHER; note = 2'fluoro-nucleotide phosphorothioate
  modified_base 2: mod_base = OTHER; note = 2'fluoro-nucleotide phosphorothioate
  modified_base 3: mod_base = OTHER; note = 2'O-methyl-nucleotide
  modified_base 4: mod_base = OTHER; note = 2'fluoro-nucleotide
  modified_base 5: mod_base = OTHER; note = 2'O-methyl-nucleotide
  modified_base 6: mod_base = OTHER; note = 2'fluoro-nucleotide
  modified_base 7: mod_base = OTHER; note = 2'O-methyl-nucleotide
  modified_base 8: mod_base = OTHER; note = 2'fluoro-nucleotide
  modified_base 9: mod_base = OTHER; note = 2'O-methyl-nucleotide
  modified_base 10: mod_base = OTHER; note = 2'fluoro-nucleotide
  modified_base 11: mod_base = OTHER; note = 2'O-methyl-nucleotide
  modified_base 12: mod_base = OTHER; note = 2'fluoro-nucleotide
  modified_base 13: mod_base = OTHER; note = 2'O-methyl-nucleotide
  modified_base 14: mod_base = OTHER; note = 2'fluoro-nucleotide
  modified_base 15: mod_base = OTHER; note = 2'O-methyl-nucleotide
  modified_base 16: mod_base = OTHER; note = 2'fluoro-nucleotide
  modified_base 17: mod_base = OTHER; note = 2'O-methyl-nucleotide
  modified_base 18: mod_base = OTHER; note = 2'fluoro-nucleotide
  modified_base 19: mod_base = OTHER; note = 2'O-methyl-nucleotide phosphorothioate
  modified_base 20: mod_base = OTHER; note = 2'O-methyl-nucleotide phosphorothioate
  modified_base 21: mod_base = OTHER; note = 2'O-methyl-nucleotide
ttggagccgatcttggacttt

SEQ ID NO: 19 - RNA, 21 nt, synthetic construct
  source 1..21: mol_type = other RNA
  modified_base 1: mod_base = OTHER; note = 2'O-methyl-nucleotide phosphorothioate
  modified_base 2: mod_base = OTHER; note = 2'O-methyl-nucleotide phosphorothioate
  modified_base 3: mod_base = OTHER; note = 2'fluoro-nucleotide
  modified_base 4: mod_base = OTHER; note = 2'O-methyl-nucleotide
  modified_base 5: mod_base = OTHER; note = 2'fluoro-nucleotide
  modified_base 6: mod_base = OTHER; note = 2'O-methyl-nucleotide
  modified_base 7: mod_base = OTHER; note = 2'fluoro-nucleotide
  modified_base 8: mod_base = OTHER; note = 2'O-methyl-nucleotide
  modified_base 9: mod_base = OTHER; note = 2'fluoro-nucleotide
  modified_base 10: mod_base = OTHER; note = 2'O-methyl-nucleotide
  modified_base 11: mod_base = OTHER; note = 2'fluoro-nucleotide
  modified_base 12: mod_base = OTHER; note = 2'O-methyl-nucleotide
  modified_base 13: mod_base = OTHER; note = 2'fluoro-nucleotide
  modified_base 14: mod_base = OTHER; note = 2'O-methyl-nucleotide
  modified_base 15: mod_base = OTHER; note = 2'fluoro-nucleotide
  modified_base 16: mod_base = OTHER; note = 2'O-methyl-nucleotide
  modified_base 17: mod_base = OTHER; note = 2'fluoro-nucleotide
  modified_base 18: mod_base = OTHER; note = 2'O-methyl-nucleotide
  modified_base 19: mod_base = OTHER; note = 2'fluoro-nucleotide phosphorothioate
  modified_base 20: mod_base = OTHER; note = 2'O-methyl-nucleotide phosphorothioate
  modified_base 21: mod_base = OTHER; note = 2'O-methyl-nucleotide
caaatagtctacaaaccaatt

SEQ ID NO: 20 - RNA, 21 nt, synthetic construct
  source 1..21: mol_type = other RNA
  modified_base 1: mod_base = OTHER; note = 2'fluoro-nucleotide phosphorothioate
  modified_base 2: mod_base = OTHER; note = 2'fluoro-nucleotide phosphorothioate
  modified_base 3: mod_base = OTHER; note = 2'O-methyl-nucleotide
  modified_base 4: mod_base = OTHER; note = 2'fluoro-nucleotide
  modified_base 5: mod_base = OTHER; note = 2'O-methyl-nucleotide
  modified_base 6: mod_base = OTHER; note = 2'fluoro-nucleotide
  modified_base 7: mod_base = OTHER; note = 2'O-methyl-nucleotide
  modified_base 8: mod_base = OTHER; note = 2'fluoro-nucleotide
  modified_base 9: mod_base = OTHER; note = 2'O-methyl-nucleotide
  modified_base 10: mod_base = OTHER; note = 2'fluoro-nucleotide
  modified_base 11: mod_base = OTHER; note = 2'O-methyl-nucleotide
  modified_base 12: mod_base = OTHER; note = 2'fluoro-nucleotide
  modified_base 13: mod_base = OTHER; note = 2'O-methyl-nucleotide
  modified_base 14: mod_base = OTHER; note = 2'fluoro-nucleotide
  modified_base 15: mod_base = OTHER; note = 2'O-methyl-nucleotide
  modified_base 16: mod_base = OTHER; note = 2'fluoro-nucleotide
  modified_base 17: mod_base = OTHER; note = 2'O-methyl-nucleotide
  modified_base 18: mod_base = OTHER; note = 2'fluoro-nucleotide
  modified_base 19: mod_base = OTHER; note = 2'O-methyl-nucleotide phosphorothioate
  modified_base 20: mod_base = OTHER; note = 2'O-methyl-nucleotide phosphorothioate
  modified_base 21: mod_base = OTHER; note = 2'O-methyl-nucleotide
ttggtttgtagactatttgtt

SEQ ID NO: 21 - RNA, 21 nt, synthetic construct
  source 1..21: mol_type = other RNA
  modified_base 1: mod_base = OTHER; note = 2'O-methyl-nucleotide phosphorothioate
  modified_base 2: mod_base = OTHER; note = 2'O-methyl-nucleotide phosphorothioate
  modified_base 3: mod_base = OTHER; note = 2'fluoro-nucleotide
  modified_base 4: mod_base = OTHER; note = 2'O-methyl-nucleotide
  modified_base 5: mod_base = OTHER; note = 2'fluoro-nucleotide
  modified_base 6: mod_base = OTHER; note = 2'O-methyl-nucleotide
  modified_base 7: mod_base = OTHER; note = 2'fluoro-nucleotide
  modified_base 8: mod_base = OTHER; note = 2'O-methyl-nucleotide
  modified_base 9: mod_base = OTHER; note = 2'fluoro-nucleotide
  modified_base 10: mod_base = OTHER; note = 2'O-methyl-nucleotide
  modified_base 11: mod_base = OTHER; note = 2'fluoro-nucleotide
  modified_base 12: mod_base = OTHER; note = 2'O-methyl-nucleotide
  modified_base 13: mod_base = OTHER; note = 2'fluoro-nucleotide
  modified_base 14: mod_base = OTHER; note = 2'O-methyl-nucleotide
  modified_base 15: mod_base = OTHER; note = 2'fluoro-nucleotide
  modified_base 16: mod_base = OTHER; note = 2'O-methyl-nucleotide
  modified_base 17: mod_base = OTHER; note = 2'fluoro-nucleotide
  modified_base 18: mod_base = OTHER; note = 2'O-methyl-nucleotide
  modified_base 19: mod_base = OTHER; note = 2'fluoro-nucleotide phosphorothioate
  modified_base 20: mod_base = OTHER; note = 2'O-methyl-nucleotide phosphorothioate
  modified_base 21: mod_base = OTHER; note = 2'O-methyl-Cholesterol-triethylene glycol nucleotide
agtctacaaaccagttgaatt

SEQ ID NO: 22 - RNA, 21 nt, synthetic construct
  source 1..21: mol_type = other RNA
  modified_base 1: mod_base = OTHER; note = Vinyl phosphonate 2'O-methyl-nucleotide phosphorothioate
  modified_base 2: mod_base = OTHER; note = 2'fluoro-nucleotide phosphorothioate
  modified_base 3: mod_base = OTHER; note = 2'O-methyl-nucleotide
  modified_base 4: mod_base = OTHER; note = 2'fluoro-nucleotide
  modified_base 5: mod_base = OTHER; note = 2'O-methyl-nucleotide
  modified_base 6: mod_base = OTHER; note = 2'fluoro-nucleotide
  modified_base 7: mod_base = OTHER; note = 2'O-methyl-nucleotide
  modified_base 8: mod_base = OTHER; note = 2'fluoro-nucleotide
  modified_base 9: mod_base = OTHER; note = 2'O-methyl-nucleotide
  modified_base 10: mod_base = OTHER; note = 2'fluoro-nucleotide
  modified_base 11: mod_base = OTHER; note = 2'O-methyl-nucleotide
  modified_base 12: mod_base = OTHER; note = 2'fluoro-nucleotide
  modified_base 13: mod_base = OTHER; note = 2'O-methyl-nucleotide
  modified_base 14: mod_base = OTHER; note = 2'fluoro-nucleotide
  modified_base 15: mod_base = OTHER; note = 2'O-methyl-nucleotide
  modified_base 16: mod_base = OTHER; note = 2'fluoro-nucleotide
  modified_base 17: mod_base = OTHER; note = 2'O-methyl-nucleotide
  modified_base 18: mod_base = OTHER; note = 2'fluoro-nucleotide
  modified_base 19: mod_base = OTHER; note = 2'O-methyl-nucleotide phosphorothioate
  modified_base 20: mod_base = OTHER; note = 2'O-methyl-nucleotide phosphorothioate
  modified_base 21: mod_base = OTHER; note = 2'O-methyl-nucleotide
ttcaactggtttgtagacttt

SEQ ID NO: 23 - RNA, 19 nt, synthetic construct
  source 1..19: mol_type = other RNA
  modified_base 1: mod_base = OTHER; note = 2'O-methyl-nucleotide phosphorothioate
  modified_base 2: mod_base = OTHER; note = 2'O-methyl-nucleotide phosphorothioate
  modified_base 3: mod_base = OTHER; note = 2'fluoro-nucleotide
  modified_base 4: mod_base = OTHER; note = 2'O-methyl-nucleotide
  modified_base 5: mod_base = OTHER; note = 2'O-methyl-nucleotide
  modified_base 6: mod_base = OTHER; note = 2'O-methyl-nucleotide
  modified_base 7: mod_base = OTHER; note = 2'fluoro-nucleotide
  modified_base 8: mod_base = OTHER; note = 2'fluoro-nucleotide
  modified_base 9: mod_base = OTHER; note = 2'fluoro-nucleotide
  modified_base 10: mod_base = OTHER; note = 2'O-methyl-nucleotide
  modified_base 11: mod_base = OTHER; note = 2'O-methyl-nucleotide
  modified_base 12: mod_base = OTHER; note = 2'fluoro-nucleotide
  modified_base 13: mod_base = OTHER; note = 2'O-methyl-nucleotide
  modified_base 14: mod_base = OTHER; note = 2'O-methyl-nucleotide
  modified_base 15: mod_base = OTHER; note = 2'O-methyl-nucleotide
  modified_base 16: mod_base = OTHER; note = 2'O-methyl-nucleotide
  modified_base 17: mod_base = OTHER; note = 2'fluoro-nucleotide
  modified_base 18: mod_base = OTHER; note = 2'O-methyl-nucleotide
  modified_base 19: mod_base = OTHER; note = 2'O-methyl-Cholesterol-triethylene glycol nucleotide
agtctacaaaccagttgaa

SEQ ID NO: 24 - RNA, 21 nt, synthetic construct
  source 1..21: mol_type = other RNA
  modified_base 1: mod_base = OTHER; note = Vinyl phosphonate 2'O-methyl-nucleotide phosphorothioate
  modified_base 2: mod_base = OTHER; note = 2'fluoro-nucleotide phosphorothioate
  modified_base 3: mod_base = OTHER; note = 2'O-methyl-nucleotide
  modified_base 4: mod_base = OTHER; note = 2'O-methyl-nucleotide
  modified_base 5: mod_base = OTHER; note = 2'O-methyl-nucleotide
  modified_base 6: mod_base = OTHER; note = 2'fluoro-nucleotide
  modified_base 7: mod_base = OTHER; note = 2'O-methyl-nucleotide
  modified_base 8: mod_base = OTHER; note = 2'O-methyl-nucleotide
  modified_base 9: mod_base = OTHER; note = 2'O-methyl-nucleotide
  modified_base 10: mod_base = OTHER; note = 2'O-methyl-nucleotide
  modified_base 11: mod_base = OTHER; note = 2'O-methyl-nucleotide
  modified_base 12: mod_base = OTHER; note = 2'O-methyl-nucleotide
  modified_base 13: mod_base = OTHER; note = 2'O-methyl-nucleotide
  modified_base 14: mod_base = OTHER; note = 2'fluoro-nucleotide
  modified_base 15: mod_base = OTHER; note = 2'O-methyl-nucleotide
  modified_base 16: mod_base = OTHER; note = 2'fluoro-nucleotide
  modified_base 17: mod_base = OTHER; note = 2'O-methyl-nucleotide
  modified_base 18: mod_base = OTHER; note = 2'O-methyl-nucleotide
  modified_base 19: mod_base = OTHER; note = 2'O-methyl-nucleotide phosphorothioate
  modified_base 20: mod_base = OTHER; note = 2'O-methyl-nucleotide phosphorothioate
  modified_base 21: mod_base = OTHER; note = 2'O-methyl-nucleotide
ttcaactggtttgtagactat

SEQ ID NO: 25 - RNA, 21 nt, synthetic construct
  source 1..21: mol_type = other RNA
  modified_base 1: mod_base = OTHER; note = Inverted abasic nucleotide phosphorothioate
  modified_base 2: mod_base = OTHER; note = 2'O-methyl-nucleotide phosphorothioate
  modified_base 3: mod_base = OTHER; note = 2'O-methyl-nucleotide
  modified_base 4: mod_base = OTHER; note = 2'O-methyl-nucleotide
  modified_base 5: mod_base = OTHER; note = 2'O-methyl-nucleotide
  modified_base 6: mod_base = OTHER; note = 2'O-methyl-nucleotide
  modified_base 7: mod_base = OTHER; note = 2'O-methyl-nucleotide
  modified_base 8: mod_base = OTHER; note = 2'fluoro-nucleotide
  modified_base 9: mod_base = OTHER; note = 2'fluoro-nucleotide
  modified_base 10: mod_base = OTHER; note = 2'fluoro-nucleotide
  modified_base 11: mod_base = OTHER; note = 2'O-methyl-nucleotide
  modified_base 12: mod_base = OTHER; note = 2'O-methyl-nucleotide
  modified_base 13: mod_base = OTHER; note = 2'O-methyl-nucleotide
  modified_base 14: mod_base = OTHER; note = 2'O-methyl-nucleotide
  modified_base 15: mod_base = OTHER; note = 2'O-methyl-nucleotide
  modified_base 16: mod_base = OTHER; note = 2'O-methyl-nucleotide
  modified_base 17: mod_base = OTHER; note = 2'O-methyl-nucleotide
  modified_base 18: mod_base = OTHER; note = 2'O-methyl-nucleotide
  modified_base 19: mod_base = OTHER; note = 2'O-methyl-nucleotide phosphorothioate
  modified_base 20: mod_base = OTHER; note = 2'O-methyl-nucleotide phosphorothioate
  modified_base 21: mod_base = OTHER; note = Inverted abasic Cholesterol-triethylene glycol nucleotide
nagtctacaaaccagttgaan

SEQ ID NO: 26 - RNA, 21 nt, synthetic construct
  source 1..21: mol_type = other RNA
  modified_base 1: mod_base = OTHER; note = Vinyl phosphonate 2'O-methyl-nucleotide phosphorothioate
  modified_base 2: mod_base = OTHER; note = 2'fluoro-nucleotide phosphorothioate
  modified_base 3: mod_base = OTHER; note = 2'O-methyl-nucleotide phosphorothioate
  modified_base 4: mod_base = OTHER; note = 2'fluoro-nucleotide
  modified_base 5: mod_base = OTHER; note = 2'O-methyl-nucleotide
  modified_base 6: mod_base = OTHER; note = 2'fluoro-nucleotide
  modified_base 7: mod_base = OTHER; note = 2'O-methyl-nucleotide
  modified_base 8: mod_base = OTHER; note = 2'fluoro-nucleotide
  modified_base 9: mod_base = OTHER; note = 2'O-methyl-nucleotide
  modified_base 10: mod_base = OTHER; note = 2'fluoro-nucleotide
  modified_base 11: mod_base = OTHER; note = 2'O-methyl-nucleotide
  modified_base 12: mod_base = OTHER; note = 2'fluoro-nucleotide
  modified_base 13: mod_base = OTHER; note = 2'O-methyl-nucleotide
  modified_base 14: mod_base = OTHER; note = 2'fluoro-nucleotide
  modified_base 15: mod_base = OTHER; note = 2'O-methyl-nucleotide
  modified_base 16: mod_base = OTHER; note = 2'fluoro-nucleotide
  modified_base 17: mod_base = OTHER; note = 2'O-methyl-nucleotide
  modified_base 18: mod_base = OTHER; note = 2'fluoro-nucleotide
  modified_base 19: mod_base = OTHER; note = 2'O-methyl-nucleotide
  modified_base 20: mod_base = OTHER; note = 2'O-methyl-nucleotide phosphorothioate
  modified_base 21: mod_base = OTHER; note = 2'O-methyl-nucleotide
ttcaactggtttgtagactat

SEQ ID NO: 27 - RNA, 19 nt, synthetic construct
  source 1..19: mol_type = other RNA
  modified_base 1: mod_base = OTHER; note = 2'O-methyl-nucleotide phosphorothioate
  modified_base 2: mod_base = OTHER; note = 2'O-methyl-nucleotide phosphorothioate
  modified_base 3: mod_base = OTHER; note = 2'O-methyl-nucleotide
  modified_base 4: mod_base = OTHER; note = 2'O-methyl-nucleotide
  modified_base 5: mod_base = OTHER; note = 2'fluoro-nucleotide
  modified_base 6: mod_base = OTHER; note = 2'O-methyl-nucleotide
  modified_base 7: mod_base = OTHER; note = 2'fluoro-nucleotide
  modified_base 8: mod_base = OTHER; note = 2'fluoro-nucleotide
  modified_base 9: mod_base = OTHER; note = 2'fluoro-nucleotide
  modified_base 10: mod_base = OTHER; note = 2'O-methyl-nucleotide
  modified_base 11: mod_base = OTHER; note = 2'O-methyl-nucleotide
  modified_base 12: mod_base = OTHER; note = 2'O-methyl-nucleotide
  modified_base 13: mod_base = OTHER; note = 2'O-methyl-nucleotide
  modified_base 14: mod_base = OTHER; note = 2'O-methyl-nucleotide
  modified_base 15: mod_base = OTHER; note = 2'O-methyl-nucleotide
  modified_base 16: mod_base = OTHER; note = 2'O-methyl-nucleotide
  modified_base 17: mod_base = OTHER; note = 2'O-methyl-nucleotide phosphorothioate
  modified_base 18: mod_base = OTHER; note = 2'O-methyl-nucleotide phosphorothioate
  modified_base 19: mod_base = OTHER; note = 2'O-methyl-Cholesterol-triethylene glycol nucleotide
agtctacaaaccagttgaa

SEQ ID NO: 28 - RNA, 21 nt, synthetic construct
  source 1..21: mol_type = other RNA
  modified_base 1: mod_base = OTHER; note = Vinyl phosphonate 2'O-methyl-nucleotide phosphorothioate
  modified_base 2: mod_base = OTHER; note = 2'fluoro-nucleotide phosphorothioate
  modified_base 3: mod_base = OTHER; note = 2'O-methyl-nucleotide phosphorothioate
  modified_base 4: mod_base = OTHER; note = 2'O-methyl-nucleotide
  modified_base 5: mod_base = OTHER; note = 2'O-methyl-nucleotide
  modified_base 6: mod_base = OTHER; note = 2'fluoro-nucleotide
  modified_base 7: mod_base = OTHER; note = 2'O-methyl-nucleotide
  modified_base 8: mod_base = OTHER; note = 2'fluoro-nucleotide
  modified_base 9: mod_base = OTHER; note = 2'fluoro-nucleotide
  modified_base 10: mod_base = OTHER; note = 2'O-methyl-nucleotide
  modified_base 11: mod_base = OTHER; note = 2'O-methyl-nucleotide
  modified_base 12: mod_base = OTHER; note = 2'O-methyl-nucleotide
  modified_base 13: mod_base = OTHER; note = 2'O-methyl-nucleotide
  modified_base 14: mod_base = OTHER; note = 2'fluoro-nucleotide
  modified_base 15: mod_base = OTHER; note = 2'O-methyl-nucleotide
  modified_base 16: mod_base = OTHER; note = 2'fluoro-nucleotide
  modified_base 17: mod_base = OTHER; note = 2'O-methyl-nucleotide
  modified_base 18: mod_base = OTHER; note = 2'O-methyl-nucleotide
  modified_base 19: mod_base = OTHER; note = 2'O-methyl-nucleotide phosphorothioate
  modified_base 20: mod_base = OTHER; note = 2'O-methyl-nucleotide phosphorothioate
  modified_base 21: mod_base = OTHER; note = 2'O-methyl-nucleotide
ttcaactggtttgtagactat

SEQ ID NO: 29 - RNA, 21 nt, synthetic construct
  source 1..21: mol_type = other RNA
  modified_base 1: mod_base = OTHER; note = 2'O-methyl-nucleotide phosphorothioate
  modified_base 2: mod_base = OTHER; note = 2'O-methyl-nucleotide phosphorothioate
  modified_base 3: mod_base = OTHER; note = 2'O-methyl-nucleotide
  modified_base 4: mod_base = OTHER; note = 2'O-methyl-nucleotide
  modified_base 5: mod_base = OTHER; note = 2'O-methyl-nucleotide
  modified_base 6: mod_base = OTHER; note = 2'O-methyl-nucleotide
  modified_base 7: mod_base = OTHER; note = 2'fluoro-nucleotide
  modified_base 8: mod_base = OTHER; note = 2'O-methyl-nucleotide
  modified_base 9: mod_base = OTHER; note = 2'fluoro-nucleotide
  modified_base 10: mod_base = OTHER; note = 2'fluoro-nucleotide
  modified_base 11: mod_base = OTHER; note = 2'fluoro-nucleotide
  modified_base 12: mod_base = OTHER; note = 2'O-methyl-nucleotide
  modified_base 13: mod_base = OTHER; note = 2'O-methyl-nucleotide
  modified_base 14: mod_base = OTHER; note = 2'O-methyl-nucleotide
  modified_base 15: mod_base = OTHER; note = 2'O-methyl-nucleotide
  modified_base 16: mod_base = OTHER; note = 2'O-methyl-nucleotide
  modified_base 17: mod_base = OTHER; note = 2'O-methyl-nucleotide
  modified_base 18: mod_base = OTHER; note = 2'O-methyl-nucleotide
  modified_base 19: mod_base = OTHER; note = 2'O-methyl-nucleotide phosphorothioate
  modified_base 20: mod_base = OTHER; note = 2'O-methyl-nucleotide phosphorothioate
  modified_base 21: mod_base = OTHER; note = 2'O-methyl-Cholesterol-triethylene glycol nucleotide
atagtctacaaaccagttgaa

SEQ ID NO: 30 - RNA, 23 nt, synthetic construct
  source 1..23: mol_type = other RNA
  modified_base 1: mod_base = OTHER; note = Vinyl phosphonate 2'O-methyl-nucleotide phosphorothioate
  modified_base 2: mod_base = OTHER; note = 2'fluoro-nucleotide phosphorothioate
  modified_base 3: mod_base = OTHER; note = 2'O-methyl-nucleotide
  modified_base 4: mod_base = OTHER; note = 2'O-methyl-nucleotide
  modified_base 5: mod_base = OTHER; note = 2'O-methyl-nucleotide
  modified_base 6: mod_base = OTHER; note = 2'fluoro-nucleotide
  modified_base 7: mod_base = OTHER; note = 2'O-methyl-nucleotide
  modified_base 8: mod_base = OTHER; note = 2'fluoro-nucleotide
  modified_base 9: mod_base = OTHER; note = 2'fluoro-nucleotide
  modified_base 10: mod_base = OTHER; note = 2'O-methyl-nucleotide
  modified_base 11: mod_base = OTHER; note = 2'O-methyl-nucleotide
  modified_base 12: mod_base = OTHER; note = 2'O-methyl-nucleotide
  modified_base 13: mod_base = OTHER; note = 2'O-methyl-nucleotide
  modified_base 14: mod_base = OTHER; note = 2'fluoro-nucleotide
  modified_base 15: mod_base = OTHER; note = 2'O-methyl-nucleotide
  modified_base 16: mod_base = OTHER; note = 2'fluoro-nucleotide
  modified_base 17: mod_base = OTHER; note = 2'O-methyl-nucleotide
  modified_base 18: mod_base = OTHER; note = 2'O-methyl-nucleotide
  modified_base 19: mod_base = OTHER; note = 2'O-methyl-nucleotide
  modified_base 20: mod_base = OTHER; note = 2'O-methyl-nucleotide
  modified_base 21: mod_base = OTHER; note = 2'O-methyl-nucleotide phosphorothioate
  modified_base 22: mod_base = OTHER; note = 2'O-methyl-nucleotide phosphorothioate
  modified_base 23: mod_base = OTHER; note = 2'O-methyl-nucleotide
ttcaactggtttgtagactattt

SEQ ID NO: 31 - RNA, 21 nt, synthetic construct
  source 1..21: mol_type = other RNA
  modified_base 1: mod_base = OTHER; note = 2'O-methyl-nucleotide phosphorothioate
  modified_base 2: mod_base = OTHER; note = 2'O-methyl-nucleotide phosphorothioate
  modified_base 3: mod_base = OTHER; note = 2'O-methyl-nucleotide
  modified_base 4: mod_base = OTHER; note = 2'O-methyl-nucleotide
  modified_base 5: mod_base = OTHER; note = 2'O-methyl-nucleotide
  modified_base 6: mod_base = OTHER; note = 2'O-methyl-nucleotide
  modified_base 7: mod_base = OTHER; note = 2'O-methyl-nucleotide
  modified_base 8: mod_base = OTHER; note = 2'O-methyl-nucleotide
  modified_base 9: mod_base = OTHER; note = 2'fluoro-nucleotide
  modified_base 10: mod_base = OTHER; note = 2'O-methyl-nucleotide
  modified_base 11: mod_base = OTHER; note = 2'fluoro-nucleotide
  modified_base 12: mod_base = OTHER; note = 2'fluoro-nucleotide
  modified_base 13: mod_base = OTHER; note = 2'fluoro-nucleotide
  modified_base 14: mod_base = OTHER; note = 2'fluoro-nucleotide
  modified_base 15: mod_base = OTHER; note = 2'O-methyl-nucleotide
  modified_base 16: mod_base = OTHER; note = 2'O-methyl-nucleotide
  modified_base 17: mod_base = OTHER; note = 2'O-methyl-nucleotide
  modified_base 18: mod_base = OTHER; note = 2'O-methyl-nucleotide
  modified_base 19: mod_base = OTHER; note = 2'O-methyl-nucleotide
  modified_base 20: mod_base = OTHER; note = 2'O-methyl-nucleotide phosphorothioate
  modified_base 21: mod_base = OTHER; note = Inverted abasic Cholesterol-triethylene glycol nucleotide
tagtctacaaaccagttgaan

SEQ ID NO: 32 - RNA, 23 nt, synthetic construct
  source 1..23: mol_type = other RNA
  modified_base 1: mod_base = OTHER; note = Vinyl phosphonate 2'O-methyl-nucleotide phosphorothioate
  modified_base 2: mod_base = OTHER; note = 2'fluoro-nucleotide phosphorothioate
  modified_base 3: mod_base = OTHER; note = 2'O-methyl-nucleotide
  modified_base 4: mod_base = OTHER; note = 2'O-methyl-nucleotide
  modified_base 5: mod_base = OTHER; note = 2'O-methyl-nucleotide
  modified_base 6: mod_base = OTHER; note = 2'O-methyl-nucleotide
  modified_base 7: mod_base = OTHER; note = 2'fluoro-nucleotide
  modified_base 8: mod_base = OTHER; note = 2'O-methyl-nucleotide
  modified_base 9: mod_base = OTHER; note = 2'O-methyl-nucleotide
  modified_base 10: mod_base = OTHER; note = 2'O-methyl-nucleotide
  modified_base 11: mod_base = OTHER; note = 2'O-methyl-nucleotide
  modified_base 12: mod_base = OTHER; note = 2'fluoro-nucleotide
  modified_base 13: mod_base = OTHER; note = 2'O-methyl-nucleotide
  modified_base 14: mod_base = OTHER; note = 2'fluoro-nucleotide
  modified_base 15: mod_base = OTHER; note = 2'O-methyl-nucleotide
  modified_base 16: mod_base = OTHER; note = 2'O-methyl-nucleotide
  modified_base 17: mod_base = OTHER; note = 2'O-methyl-nucleotide
  modified_base 18: mod_base = OTHER; note = 2'O-methyl-nucleotide
  modified_base 19: mod_base = OTHER; note = 2'O-methyl-nucleotide
  modified_base 20: mod_base = OTHER; note = 2'O-methyl-nucleotide
  modified_base 21: mod_base = OTHER; note = 2'O-methyl-nucleotide phosphorothioate
  modified_base 22: mod_base = OTHER; note = 2'O-methyl-nucleotide phosphorothioate
  modified_base 23: mod_base = OTHER; note = 2'O-methyl-nucleotide
ttcaactggtttgtagactattt

SEQ ID NO: 33 - RNA, 22 nt, synthetic construct
  source 1..22: mol_type = other RNA
  modified_base 1: mod_base = OTHER; note = Inverted abasic nucleotide phosphorothioate
  modified_base 2: mod_base = OTHER; note = 2'O-methyl-nucleotide phosphorothioate
  modified_base 3: mod_base = OTHER; note = 2'O-methyl-nucleotide
  modified_base 4: mod_base = OTHER; note = 2'O-methyl-nucleotide
  modified_base 5: mod_base = OTHER; note = 2'O-methyl-nucleotide
  modified_base 6: mod_base = OTHER; note = 2'O-methyl-nucleotide
  modified_base 7: mod_base = OTHER; note = 2'O-methyl-nucleotide
  modified_base 8: mod_base = OTHER; note = 2'fluoro-nucleotide
  modified_base 9: mod_base = OTHER; note = 2'fluoro-nucleotide
  modified_base 10: mod_base = OTHER; note = 2'fluoro-nucleotide
  modified_base 11: mod_base = OTHER; note = 2'O-methyl-nucleotide
  modified_base 12: mod_base = OTHER; note = 2'O-methyl-nucleotide
  modified_base 13: mod_base = OTHER; note = 2'O-methyl-nucleotide
  modified_base 14: mod_base = OTHER; note = 2'O-methyl-nucleotide
  modified_base 15: mod_base = OTHER; note = 2'O-methyl-nucleotide
  modified_base 16: mod_base = OTHER; note = 2'O-methyl-nucleotide
  modified_base 17: mod_base = OTHER; note = 2'O-methyl-nucleotide
  modified_base 18: mod_base = OTHER; note = 2'O-methyl-nucleotide
  modified_base 19: mod_base = OTHER; note = 2'O-methyl-nucleotide
  modified_base 20: mod_base = OTHER; note = 2'O-methyl-nucleotide phosphorothioate
  modified_base 21: mod_base = OTHER; note = 2'O-methyl-nucleotide phosphorothioate
  modified_base 22: mod_base = OTHER; note = 2'O-methyl-Cholesterol-triethylene glycol nucleotide
nagtctacaaaccagttgacca

SEQ ID NO: 34 - RNA, 21 nt, synthetic construct
  source 1..21: mol_type = other RNA
  modified_base 1: mod_base = OTHER; note = Vinyl phosphonate 2'O-methyl-nucleotide phosphorothioate
  modified_base 2: mod_base = OTHER; note = 2'fluoro-nucleotide phosphorothioate
  modified_base 3: mod_base = OTHER; note = 2'O-methyl-nucleotide phosphorothioate
  modified_base 4: mod_base = OTHER; note = 2'O-methyl-nucleotide
  modified_base 5: mod_base = OTHER; note = 2'O-methyl-nucleotide
  modified_base 6: mod_base = OTHER; note = 2'fluoro-nucleotide
  modified_base 7: mod_base = OTHER; note = 2'O-methyl-nucleotide
  modified_base 8: mod_base = OTHER; note = 2'O-methyl-nucleotide
  modified_base 9: mod_base = OTHER; note = 2'O-methyl-nucleotide
  modified_base 10: mod_base = OTHER; note = 2'O-methyl-nucleotide
  modified_base 11: mod_base = OTHER; note = 2'O-methyl-nucleotide
  modified_base 12: mod_base = OTHER; note = 2'O-methyl-nucleotide
  modified_base 13: mod_base = OTHER; note = 2'O-methyl-nucleotide
  modified_base 14: mod_base = OTHER; note = 2'fluoro-nucleotide
  modified_base 15: mod_base = OTHER; note = 2'O-methyl-nucleotide
  modified_base 16: mod_base = OTHER; note = 2'fluoro-nucleotide
  modified_base 17: mod_base = OTHER; note = 2'O-methyl-nucleotide
  modified_base 18: mod_base = OTHER; note = 2'O-methyl-nucleotide
  modified_base 19: mod_base = OTHER; note = 2'O-methyl-nucleotide
  modified_base 20: mod_base = OTHER; note = 2'O-methyl-nucleotide phosphorothioate
  modified_base 21: mod_base = OTHER; note = 2'O-methyl-nucleotide
ttcaactggtttgtagactat

SEQ ID NO: 35 - RNA, 23 nt, synthetic construct
  source 1..23: mol_type = other RNA
  modified_base 1: mod_base = OTHER; note = Inverted abasic nucleotide phosphorothioate
  modified_base 2: mod_base = OTHER; note = 2'O-methyl-nucleotide phosphorothioate
  modified_base 3: mod_base = OTHER; note = 2'O-methyl-nucleotide
  modified_base 4: mod_base = OTHER; note = 2'O-methyl-nucleotide
  modified_base 5: mod_base = OTHER; note = 2'O-methyl-nucleotide
  modified_base 6: mod_base = OTHER; note = 2'O-methyl-nucleotide
  modified_base 7: mod_base = OTHER; note = 2'O-methyl-nucleotide
  modified_base 8: mod_base = OTHER; note = 2'O-methyl-nucleotide
  modified_base 9: mod_base = OTHER; note = 2'O-methyl-nucleotide
  modified_base 10: mod_base = OTHER; note = 2'fluoro-nucleotide
  modified_base 11: mod_base = OTHER; note = 2'fluoro-nucleotide
  modified_base 12: mod_base = OTHER; note = 2'fluoro-nucleotide
  modified_base 13: mod_base = OTHER; note = 2'O-methyl-nucleotide
  modified_base 14: mod_base = OTHER; note = 2'O-methyl-nucleotide
  modified_base 15: mod_base = OTHER; note = 2'O-methyl-nucleotide
  modified_base 16: mod_base = OTHER; note = 2'O-methyl-nucleotide
  modified_base 17: mod_base = OTHER; note = 2'O-methyl-nucleotide
  modified_base 18: mod_base = OTHER; note = 2'O-methyl-nucleotide
  modified_base 19: mod_base = OTHER; note = 2'O-methyl-nucleotide
  modified_base 20: mod_base = OTHER; note = 2'O-methyl-nucleotide
  modified_base 21: mod_base = OTHER; note = 2'O-methyl-nucleotide phosphorothioate
  modified_base 22: mod_base = OTHER; note = 2'O-methyl-nucleotide phosphorothioate
  modified_base 23: mod_base = OTHER; note = Inverted abasic Cholesterol-triethylene glycol nucleotide
natagtctacaaaccagttgaan

SEQ ID NO: 36 - RNA, 21 nt, synthetic construct
  source 1..21: mol_type = other RNA
  modified_base 1: mod_base = OTHER; note = Vinyl phosphonate 2'O-methyl-nucleotide phosphorothioate
  modified_base 2: mod_base = OTHER; note = 2'fluoro-nucleotide phosphorothioate
  modified_base 3: mod_base = OTHER; note = 2'O-methyl-nucleotide phosphorothioate
  modified_base 4: mod_base = OTHER; note = 2'fluoro-nucleotide
  modified_base 5: mod_base = OTHER; note = 2'O-methyl-nucleotide
  modified_base 6: mod_base = OTHER; note = 2'fluoro-nucleotide
  modified_base 7: mod_base = OTHER; note = 2'O-methyl-nucleotide
  modified_base 8: mod_base = OTHER; note = 2'fluoro-nucleotide
  modified_base 9: mod_base = OTHER; note = 2'O-methyl-nucleotide
  modified_base 10: mod_base = OTHER; note = 2'fluoro-nucleotide
  modified_base 11: mod_base = OTHER; note = 2'O-methyl-nucleotide
  modified_base 12: mod_base = OTHER; note = 2'fluoro-nucleotide
  modified_base 13: mod_base = OTHER; note = 2'O-methyl-nucleotide
  modified_base 14: mod_base = OTHER; note = 2'fluoro-nucleotide
  modified_base 15: mod_base = OTHER; note = 2'O-methyl-nucleotide
  modified_base 16: mod_base = OTHER; note = 2'fluoro-nucleotide
  modified_base 17: mod_base = OTHER; note = 2'O-methyl-nucleotide
  modified_base 18: mod_base = OTHER; note = 2'fluoro-nucleotide
  modified_base 19: mod_base = OTHER; note = 2'O-methyl-nucleotide
  modified_base 20: mod_base = OTHER; note = 2'O-methyl-nucleotide phosphorothioate
  modified_base 21: mod_base = OTHER; note = 2'O-methyl-nucleotide
ttcaactggtttgtagactat

SEQ ID NO: 37 - RNA, 21 nt, synthetic construct
  source 1..21: mol_type = other RNA
  modified_base 1: mod_base = OTHER; note = Inverted abasic nucleotide phosphorothioate
  modified_base 2: mod_base = OTHER; note = 2'O-methyl-nucleotide phosphorothioate
  modified_base 3: mod_base = OTHER; note = 2'O-methyl-nucleotide
  modified_base 4: mod_base = OTHER; note = 2'O-methyl-nucleotide
  modified_base 5: mod_base = OTHER; note = 2'O-methyl-nucleotide
  modified_base 6: mod_base = OTHER; note = 2'O-methyl-nucleotide
  modified_base 7: mod_base = OTHER; note = 2'O-methyl-nucleotide
  modified_base 8: mod_base = OTHER; note = 2'fluoro-nucleotide
  modified_base 9: mod_base = OTHER; note = 2'fluoro-nucleotide
  modified_base 10: mod_base = OTHER; note = 2'fluoro-nucleotide
  modified_base 11: mod_base = OTHER; note = 2'O-methyl-nucleotide
  modified_base 12: mod_base = OTHER; note = 2'O-methyl-nucleotide
  modified_base 13: mod_base = OTHER; note = 2'O-methyl-nucleotide
  modified_base 14: mod_base = OTHER; note = 2'O-methyl-nucleotide
  modified_base 15: mod_base = OTHER; note = 2'O-methyl-nucleotide
  modified_base 16: mod_base = OTHER; note = 2'O-methyl-nucleotide
  modified_base 17: mod_base = OTHER; note = 2'O-methyl-nucleotide
  modified_base 18: mod_base = OTHER; note = 2'O-methyl-nucleotide
  modified_base 19: mod_base = OTHER; note = 2'O-methyl-nucleotide phosphorothioate
  modified_base 20: mod_base = OTHER; note = 2'O-methyl-nucleotide phosphorothioate
  modified_base 21: mod_base = OTHER; note = Inverted abasic Cholesterol-triethylene glycol nucleotide
nagtctacaaaccagttgaan

SEQ ID NO: 38 - RNA, 23 nt, synthetic construct
  source 1..23: mol_type = other RNA
  modified_base 1: mod_base = OTHER; note = Vinyl phosphonate 2'O-methyl-nucleotide phosphorothioate
  modified_base 2: mod_base = OTHER; note = 2'fluoro-nucleotide phosphorothioate
  modified_base 3: mod_base = OTHER; note = 2'O-methyl-nucleotide
  modified_base 4: mod_base = OTHER; note = 2'O-methyl-nucleotide
  modified_base 5: mod_base = OTHER; note = 2'O-methyl-nucleotide
  modified_base 6: mod_base = OTHER; note = 2'fluoro-nucleotide
  modified_base 7: mod_base = OTHER; note = 2'O-methyl-nucleotide
  modified_base 8: mod_base = OTHER; note = 2'fluoro-nucleotide
  modified_base 9: mod_base = OTHER; note = 2'fluoro-nucleotide
  modified_base 10: mod_base = OTHER; note = 2'O-methyl-nucleotide
  modified_base 11: mod_base = OTHER; note = 2'O-methyl-nucleotide
  modified_base 12: mod_base = OTHER; note = 2'O-methyl-nucleotide
  modified_base 13: mod_base = OTHER; note = 2'O-methyl-nucleotide
  modified_base 14: mod_base = OTHER; note = 2'fluoro-nucleotide
  modified_base 15: mod_base = OTHER; note = 2'O-methyl-nucleotide
  modified_base 16: mod_base = OTHER; note = 2'fluoro-nucleotide
  modified_base 17: mod_base = OTHER; note = 2'O-methyl-nucleotide
  modified_base 18: mod_base = OTHER; note = 2'O-methyl-nucleotide
  modified_base 19: mod_base = OTHER; note = 2'O-methyl-nucleotide
  modified_base 20: mod_base = OTHER; note = 2'O-methyl-nucleotide
  modified_base 21: mod_base = OTHER; note = 2'O-methyl-nucleotide phosphorothioate
  modified_base 22: mod_base = OTHER; note = 2'O-methyl-nucleotide phosphorothioate
  modified_base 23: mod_base = OTHER; note = 2'O-methyl-nucleotide
ttcaactggtttgtagactattt

SEQ ID NO: 39 - RNA, 21 nt, synthetic construct
  source 1..21: mol_type = other RNA
  modified_base 1: mod_base = OTHER; note = 2'O-methyl-nucleotide phosphorothioate
  modified_base 2: mod_base = OTHER; note = 2'O-methyl-nucleotide phosphorothioate
  modified_base 3: mod_base = OTHER; note = 2'O-methyl-nucleotide
  modified_base 4: mod_base = OTHER; note = 2'O-methyl-nucleotide
  modified_base 5: mod_base = OTHER; note = 2'O-methyl-nucleotide
  modified_base 6: mod_base = OTHER; note = 2'O-methyl-nucleotide
  modified_base 7: mod_base = OTHER; note = 2'fluoro-nucleotide
  modified_base 8: mod_base = OTHER; note = 2'O-methyl-nucleotide
  modified_base 9: mod_base = OTHER; note = 2'fluoro-nucleotide
  modified_base 10: mod_base = OTHER; note = 2'fluoro-nucleotide
  modified_base 11: mod_base = OTHER; note = 2'fluoro-nucleotide
  modified_base 12: mod_base = OTHER; note = 2'O-methyl-nucleotide
  modified_base 13: mod_base = OTHER; note = 2'O-methyl-nucleotide
  modified_base 14: mod_base = OTHER; note = 2'O-methyl-nucleotide
  modified_base 15: mod_base = OTHER; note = 2'O-methyl-nucleotide
  modified_base 16: mod_base = OTHER; note = 2'O-methyl-nucleotide
  modified_base 17: mod_base = OTHER; note = 2'O-methyl-nucleotide
  modified_base 18: mod_base = OTHER; note = 2'O-methyl-nucleotide
  modified_base 19: mod_base = OTHER; note = 2'O-methyl-nucleotide phosphorothioate
  modified_base 20: mod_base = OTHER; note = 2'O-methyl-nucleotide phosphorothioate
  modified_base 21: mod_base = OTHER; note = 2'O-methyl-Cholesterol-triethylene glycol nucleotide
atagtctacaaaccagttgaa

SEQ ID NO: 40 - RNA, 21 nt, synthetic construct
  source 1..21: mol_type = other RNA
  modified_base 1: mod_base = OTHER; note = Vinyl phosphonate 2'O-methyl-nucleotide phosphorothioate
  modified_base 2: mod_base = OTHER; note = 2'fluoro-nucleotide phosphorothioate
  modified_base 3: mod_base = OTHER; note = 2'O-methyl-nucleotide phosphorothioate
  modified_base 4: mod_base = OTHER; note = 2'fluoro-nucleotide
  modified_base 5: mod_base = OTHER; note = 2'O-methyl-nucleotide
  modified_base 6: mod_base = OTHER; note = 2'fluoro-nucleotide
  modified_base 7: mod_base = OTHER; note = 2'O-methyl-nucleotide
  modified_base 8: mod_base = OTHER; note = 2'fluoro-nucleotide
  modified_base 9: mod_base = OTHER; note = 2'O-methyl-nucleotide
  modified_base 10: mod_base = OTHER; note = 2'fluoro-nucleotide
  modified_base 11: mod_base = OTHER; note = 2'O-methyl-nucleotide
  modified_base 12: mod_base = OTHER; note = 2'fluoro-nucleotide
  modified_base 13: mod_base = OTHER; note = 2'O-methyl-nucleotide
  modified_base 14: mod_base = OTHER; note = 2'fluoro-nucleotide
  modified_base 15: mod_base = OTHER; note = 2'O-methyl-nucleotide
  modified_base 16: mod_base = OTHER; note = 2'fluoro-nucleotide
  modified_base 17: mod_base = OTHER; note = 2'O-methyl-nucleotide
  modified_base 18: mod_base = OTHER; note = 2'fluoro-nucleotide
  modified_base 19: mod_base = OTHER; note = 2'O-methyl-nucleotide
  modified_base 20: mod_base = OTHER; note = 2'O-methyl-nucleotide phosphorothioate
  modified_base 21: mod_base = OTHER; note = 2'O-methyl-nucleotide
ttcaactggtttgtagactat

SEQ ID NO: 41 - RNA, 21 nt, synthetic construct
  source 1..21: mol_type = other RNA
  modified_base 1: mod_base = OTHER; note = Inverted abasic nucleotide phosphorothioate
  modified_base 2: mod_base = OTHER; note = 2'O-methyl-nucleotide phosphorothioate
  modified_base 3: mod_base = OTHER; note = 2'O-methyl-nucleotide
  modified_base 4: mod_base = OTHER; note = 2'O-methyl-nucleotide
  modified_base 5: mod_base = OTHER; note = 2'O-methyl-nucleotide
  modified_base 6: mod_base = OTHER; note = 2'O-methyl-nucleotide
  modified_base 7: mod_base = OTHER; note = 2'O-methyl-nucleotide
  modified_base 8: mod_base = OTHER; note = 2'fluoro-nucleotide
  modified_base 9: mod_base = OTHER; note = 2'fluoro-nucleotide
  modified_base 10: mod_base = OTHER; note = 2'fluoro-nucleotide
  modified_base 11: mod_base = OTHER; note = 2'O-methyl-nucleotide
  modified_base 12: mod_base = OTHER; note = 2'O-methyl-nucleotide
  modified_base 13: mod_base = OTHER; note = 2'O-methyl-nucleotide
  modified_base 14: mod_base = OTHER; note = 2'O-methyl-nucleotide
  modified_base 15: mod_base = OTHER; note = 2'O-methyl-nucleotide
  modified_base 16: mod_base = OTHER; note = 2'O-methyl-nucleotide
  modified_base 17: mod_base = OTHER; note = 2'O-methyl-nucleotide
  modified_base 18: mod_base = OTHER; note = 2'O-methyl-nucleotide
  modified_base 19: mod_base = OTHER; note = 2'O-methyl-nucleotide phosphorothioate
  modified_base 20: mod_base = OTHER; note = 2'O-methyl-nucleotide phosphorothioate
  modified_base 21: mod_base = OTHER; note = Inverted abasic Cholesterol-triethylene glycol nucleotide
nagtctacaaaccagttgaan

SEQ ID NO: 42 - RNA, 21 nt, synthetic construct
  source 1..21: mol_type = other RNA
  modified_base 1: mod_base = OTHER; note = Vinyl phosphonate 2'O-methyl-nucleotide phosphorothioate
  modified_base 2: mod_base = OTHER; note = 2'fluoro-nucleotide phosphorothioate
  modified_base 3: mod_base = OTHER; note = 2'O-methyl-nucleotide phosphorothioate
  modified_base 4: mod_base = OTHER; note = 2'O-methyl-nucleotide
  modified_base 5: mod_base = OTHER; note = 2'O-methyl-nucleotide
  modified_base 6: mod_base = OTHER; note = 2'fluoro-nucleotide
  modified_base 7: mod_base = OTHER; note = 2'O-methyl-nucleotide
  modified_base 8: mod_base = OTHER; note = 2'fluoro-nucleotide
  modified_base 9: mod_base = OTHER; note = 2'fluoro-nucleotide
  modified_base 10: mod_base = OTHER; note = 2'O-methyl-nucleotide
  modified_base 11: mod_base = OTHER; note = 2'O-methyl-nucleotide
  modified_base 12: mod_base = OTHER; note = 2'O-methyl-nucleotide
  modified_base 13: mod_base = OTHER; note = 2'O-methyl-nucleotide
  modified_base 14: mod_base = OTHER; note = 2'fluoro-nucleotide
  modified_base 15: mod_base = OTHER; note = 2'O-methyl-nucleotide
  modified_base 16: mod_base = OTHER; note = 2'fluoro-nucleotide
  modified_base 17: mod_base = OTHER; note = 2'O-methyl-nucleotide
  modified_base 18: mod_base = OTHER; note = 2'O-methyl-nucleotide
  modified_base 19: mod_base = OTHER; note = 2'O-methyl-nucleotide phosphorothioate
  modified_base 20: mod_base = OTHER; note = 2'O-methyl-nucleotide phosphorothioate
  modified_base 21: mod_base = OTHER; note = 2'O-methyl-nucleotide
ttcaactggtttgtagactat

SEQ ID NO: 43 - RNA, 19 nt, synthetic construct
  source 1..19: mol_type = other RNA
  modified_base 1: mod_base = OTHER; note = 2'O-methyl-nucleotide phosphorothioate
  modified_base 2: mod_base = OTHER; note = 2'O-methyl-nucleotide phosphorothioate
  modified_base 3: mod_base = OTHER; note = 2'O-methyl-nucleotide
  modified_base 4: mod_base = OTHER; note = 2'O-methyl-nucleotide
  modified_base 5: mod_base = OTHER; note = 2'fluoro-nucleotide
  modified_base 6: mod_base = OTHER; note = 2'O-methyl-nucleotide
  modified_base 7: mod_base = OTHER; note = 2'fluoro-nucleotide
  modified_base 8: mod_base = OTHER; note = 2'fluoro-nucleotide
  modified_base 9: mod_base = OTHER; note = 2'fluoro-nucleotide
  modified_base 10: mod_base = OTHER; note = 2'O-methyl-nucleotide
  modified_base 11: mod_base = OTHER; note = 2'O-methyl-nucleotide
  modified_base 12: mod_base = OTHER; note = 2'O-methyl-nucleotide
  modified_base 13: mod_base = OTHER; note = 2'O-methyl-nucleotide
  modified_base 14: mod_base = OTHER; note = 2'O-methyl-nucleotide
  modified_base 15: mod_base = OTHER; note = 2'O-methyl-nucleotide
  modified_base 16: mod_base = OTHER; note = 2'O-methyl-nucleotide
  modified_base 17: mod_base = OTHER; note = 2'O-methyl-nucleotide phosphorothioate
  modified_base 18: mod_base = OTHER; note = 2'O-methyl-nucleotide phosphorothioate
  modified_base 19: mod_base = OTHER; note = 2'O-methyl-Cholesterol-triethylene glycol nucleotide
agtctacaaaccagttgaa

SEQ ID NO: 44 - RNA, 21 nt, synthetic construct
  source 1..21: mol_type = other RNA
  modified_base 1: mod_base = OTHER; note = Vinyl phosphonate 2'O-methyl-nucleotide phosphorothioate
  modified_base 2: mod_base = OTHER; note = 2'fluoro-nucleotide phosphorothioate
  modified_base 3: mod_base = OTHER; note = 2'O-methyl-nucleotide phosphorothioate
  modified_base 4: mod_base = OTHER; note = 2'fluoro-nucleotide
  modified_base 5: mod_base = OTHER; note = 2'O-methyl-nucleotide
  modified_base 6: mod_base = OTHER; note = 2'fluoro-nucleotide
  modified_base 7: mod_base = OTHER; note = 2'O-methyl-nucleotide
  modified_base 8: mod_base = OTHER; note = 2'fluoro-nucleotide
  modified_base 9: mod_base = OTHER; note = 2'O-methyl-nucleotide
  modified_base 10: mod_base = OTHER; note = 2'fluoro-nucleotide
  modified_base 11: mod_base = OTHER; note = 2'O-methyl-nucleotide
  modified_base 12: mod_base = OTHER; note = 2'fluoro-nucleotide
  modified_base 13: mod_base = OTHER; note = 2'O-methyl-nucleotide
  modified_base 14: mod_base = OTHER; note = 2'fluoro-nucleotide
  modified_base 15: mod_base = OTHER; note = 2'O-methyl-nucleotide
  modified_base 16: mod_base = OTHER; note = 2'fluoro-nucleotide
  modified_base 17: mod_base = OTHER; note = 2'O-methyl-nucleotide
  modified_base 18: mod_base = OTHER; note = 2'fluoro-nucleotide
  modified_base 19: mod_base = OTHER; note = 2'O-methyl-nucleotide
  modified_base 20: mod_base = OTHER; note = 2'O-methyl-nucleotide phosphorothioate
  modified_base 21: mod_base = OTHER; note = 2'O-methyl-nucleotide
ttcaactggtttgtagactat

SEQ ID NO: 45 - RNA, 21 nt, synthetic construct
  source 1..21: mol_type = other RNA
  modified_base 1: mod_base = OTHER; note = Inverted abasic nucleotide phosphorothioate
  modified_base 2: mod_base = OTHER; note = 2'O-methyl-nucleotide phosphorothioate
  modified_base 3: mod_base = OTHER; note = 2'O-methyl-nucleotide
  modified_base 4: mod_base = OTHER; note = 2'O-methyl-nucleotide
  modified_base 5: mod_base = OTHER; note = 2'O-methyl-nucleotide
  modified_base 6: mod_base = OTHER; note = 2'O-methyl-nucleotide
  modified_base 7: mod_base = OTHER; note = 2'O-methyl-nucleotide
  modified_base 8: mod_base = OTHER; note = 2'fluoro-nucleotide
  modified_base 9: mod_base = OTHER; note = 2'fluoro-nucleotide
  modified_base 10: mod_base = OTHER; note = 2'fluoro-nucleotide
  modified_base 11: mod_base = OTHER; note = 2'O-methyl-nucleotide
  modified_base 12: mod_base = OTHER; note = 2'O-methyl-nucleotide
  modified_base 13: mod_base = OTHER; note = 2'O-methyl-nucleotide
  modified_base 14: mod_base = OTHER; note = 2'O-methyl-nucleotide
  modified_base 15: mod_base = OTHER; note = 2'O-methyl-nucleotide
  modified_base 16: mod_base = OTHER; note = 2'O-methyl-nucleotide
  modified_base 17: mod_base = OTHER; note = 2'O-methyl-nucleotide
  modified_base 18: mod_base = OTHER; note = 2'O-methyl-nucleotide
  modified_base 19: mod_base = OTHER; note = 2'O-methyl-nucleotide phosphorothioate
  modified_base 20: mod_base = OTHER; note = 2'O-methyl-nucleotide phosphorothioate
  modified_base 21: mod_base = OTHER; note = Inverted abasic Cholesterol-triethylene glycol nucleotide
nagtctacaaaccagttgaan

SEQ ID NO: 46 - RNA, 23 nt, synthetic construct
  source 1..23: mol_type = other RNA
  modified_base 1: mod_base = OTHER; note = Vinyl phosphonate 2'O-methyl-nucleotide phosphorothioate
  modified_base 2: mod_base = OTHER; note = 2'fluoro-nucleotide phosphorothioate
  modified_base 3: mod_base = OTHER; note = 2'O-methyl-nucleotide
  modified_base 4: mod_base = OTHER; note = 2'O-methyl-nucleotide
  modified_base 5: mod_base = OTHER; note = 2'O-methyl-nucleotide
  modified_base 6: mod_base = OTHER; note = 2'O-methyl-nucleotide
  modified_base 7: mod_base = OTHER; note = 2'fluoro-nucleotide
  modified_base 8: mod_base = OTHER; note = 2'O-methyl-nucleotide
  modified_base 9: mod_base = OTHER; note = 2'O-methyl-nucleotide
  modified_base 10: mod_base = OTHER; note = 2'O-methyl-nucleotide
  modified_base 11: mod_base = OTHER; note = 2'O-methyl-nucleotide
  modified_base 12: mod_base = OTHER; note = 2'fluoro-nucleotide
  modified_base 13: mod_base = OTHER; note = 2'O-methyl-nucleotide
  modified_base 14: mod_base = OTHER; note = 2'fluoro-nucleotide
  modified_base 15: mod_base = OTHER; note = 2'O-methyl-nucleotide
  modified_base 16: mod_base = OTHER; note = 2'O-methyl-nucleotide
  modified_base 17: mod_base = OTHER; note = 2'O-methyl-nucleotide
  modified_base 18: mod_base = OTHER; note = 2'O-methyl-nucleotide
  modified_base 19: mod_base = OTHER; note = 2'O-methyl-nucleotide
  modified_base 20: mod_base = OTHER; note = 2'O-methyl-nucleotide
  modified_base 21: mod_base = OTHER; note = 2'O-methyl-nucleotide phosphorothioate
  modified_base 22: mod_base = OTHER; note = 2'O-methyl-nucleotide phosphorothioate
  modified_base 23: mod_base = OTHER; note = 2'O-methyl-nucleotide
ttcaactggtttgtagactattt

SEQ ID NO: 47 - RNA, 21 nt, synthetic construct
  source 1..21: mol_type = other RNA
  modified_base 1: mod_base = OTHER; note = 2'O-methyl-nucleotide phosphorothioate
  modified_base 2: mod_base = OTHER; note = 2'O-methyl-nucleotide phosphorothioate
  modified_base 3: mod_base = OTHER; note = 2'O-methyl-nucleotide
  modified_base 4: mod_base = OTHER; note = 2'O-methyl-nucleotide
  modified_base 5: mod_base = OTHER; note = 2'O-methyl-nucleotide
  modified_base 6: mod_base = OTHER; note = 2'O-methyl-nucleotide
  modified_base 7: mod_base = OTHER; note = 2'O-methyl-nucleotide
  modified_base 8: mod_base = OTHER; note = 2'O-methyl-nucleotide
  modified_base 9: mod_base = OTHER; note = 2'fluoro-nucleotide
  modified_base 10: mod_base = OTHER; note = 2'O-methyl-nucleotide
  modified_base 11: mod_base = OTHER; note = 2'fluoro-nucleotide
  modified_base 12: mod_base = OTHER; note = 2'fluoro-nucleotide
  modified_base 13: mod_base = OTHER; note = 2'fluoro-nucleotide
  modified_base 14: mod_base = OTHER; note = 2'fluoro-nucleotide
  modified_base 15: mod_base = OTHER; note = 2'O-methyl-nucleotide
  modified_base 16: mod_base = OTHER; note = 2'O-methyl-nucleotide
  modified_base 17: mod_base = OTHER; note = 2'O-methyl-nucleotide
  modified_base 18: mod_base = OTHER; note = 2'O-methyl-nucleotide
  modified_base 19: mod_base = OTHER; note = 2'O-methyl-nucleotide
  modified_base 20: mod_base = OTHER; note = 2'O-methyl-nucleotide phosphorothioate
  modified_base 21: mod_base = OTHER; note = Inverted abasic Cholesterol-triethylene glycol nucleotide
tagtctacaaaccagttgaan

SEQ ID NO: 48 - RNA, 21 nt, synthetic construct
  source 1..21: mol_type = other RNA
  modified_base 1: mod_base = OTHER; note = Vinyl phosphonate 2'O-methyl-nucleotide phosphorothioate
  modified_base 2: mod_base = OTHER; note = 2'fluoro-nucleotide phosphorothioate
  modified_base 3: mod_base = OTHER; note = 2'O-methyl-nucleotide phosphorothioate
  modified_base 4: mod_base = OTHER; note = 2'fluoro-nucleotide
  modified_base 5: mod_base = OTHER; note = 2'O-methyl-nucleotide
  modified_base 6: mod_base = OTHER; note = 2'fluoro-nucleotide
  modified_base 7: mod_base = OTHER; note = 2'O-methyl-nucleotide
  modified_base 8: mod_base = OTHER; note = 2'fluoro-nucleotide
  modified_base 9: mod_base = OTHER; note = 2'O-methyl-nucleotide
  modified_base 10: mod_base = OTHER; note = 2'fluoro-nucleotide
  modified_base 11: mod_base = OTHER; note = 2'O-methyl-nucleotide
  modified_base 12: mod_base = OTHER; note = 2'fluoro-nucleotide
  modified_base 13: mod_base = OTHER; note = 2'O-methyl-nucleotide
  modified_base 14: mod_base = OTHER; note = 2'fluoro-nucleotide
  modified_base 15: mod_base = OTHER; note = 2'O-methyl-nucleotide
  modified_base 16: mod_base = OTHER; note = 2'fluoro-nucleotide
  modified_base 17: mod_base = OTHER; note = 2'O-methyl-nucleotide
  modified_base 18: mod_base = OTHER; note = 2'fluoro-nucleotide
  modified_base 19: mod_base = OTHER; note = 2'O-methyl-nucleotide
  modified_base 20: mod_base = OTHER; note = 2'O-methyl-nucleotide phosphorothioate
  modified_base 21: mod_base = OTHER; note = 2'O-methyl-nucleotide
ttcaactggtttgtagactat

SEQ ID NO: 49 - RNA, 23 nt, synthetic construct
  source 1..23: mol_type = other RNA
  modified_base 1: mod_base = OTHER; note = Inverted abasic nucleotide phosphorothioate
  modified_base 2: mod_base = OTHER; note = 2'O-methyl-nucleotide phosphorothioate
  modified_base 3: mod_base = OTHER; note = 2'O-methyl-nucleotide
  modified_base 4: mod_base = OTHER; note = 2'O-methyl-nucleotide
  modified_base 5: mod_base = OTHER; note = 2'O-methyl-nucleotide
  modified_base 6: mod_base = OTHER; note = 2'O-methyl-nucleotide
  modified_base 7: mod_base = OTHER; note = 2'O-methyl-nucleotide
  modified_base 8: mod_base = OTHER; note = 2'O-methyl-nucleotide
  modified_base 9: mod_base = OTHER; note = 2'O-methyl-nucleotide
  modified_base 10: mod_base = OTHER; note = 2'fluoro-nucleotide
  modified_base 11: mod_base = OTHER; note = 2'fluoro-nucleotide
  modified_base 12: mod_base = OTHER; note = 2'fluoro-nucleotide
  modified_base 13: mod_base = OTHER; note = 2'O-methyl-nucleotide
  modified_base 14: mod_base = OTHER; note = 2'O-methyl-nucleotide
  modified_base 15: mod_base = OTHER; note = 2'O-methyl-nucleotide
  modified_base 16: mod_base = OTHER; note = 2'O-methyl-nucleotide
  modified_base 17: mod_base = OTHER; note = 2'O-methyl-nucleotide
  modified_base 18: mod_base = OTHER; note = 2'O-methyl-nucleotide
  modified_base 19: mod_base = OTHER; note = 2'O-methyl-nucleotide
  modified_base 20: mod_base = OTHER; note = 2'O-methyl-nucleotide
  modified_base 21: mod_base = OTHER; note = 2'O-methyl-nucleotide phosphorothioate
  modified_base 22: mod_base = OTHER; note = 2'O-methyl-nucleotide phosphorothioate
  modified_base 23: mod_base = OTHER; note = Inverted abasic Cholesterol-triethylene glycol nucleotide
natagtctacaaaccagttgaan

SEQ ID NO: 50 - RNA, 23 nt, synthetic construct
  source 1..23: mol_type = other RNA
  modified_base 1: mod_base = OTHER; note = Vinyl phosphonate 2'O-methyl-nucleotide phosphorothioate
  modified_base 2: mod_base = OTHER; note = 2'fluoro-nucleotide phosphorothioate
  modified_base 3: mod_base = OTHER; note = 2'O-methyl-nucleotide
  modified_base 4: mod_base = OTHER; note = 2'O-methyl-nucleotide
  modified_base 5: mod_base = OTHER; note = 2'O-methyl-nucleotide
  modified_base 6: mod_base = OTHER; note = 2'fluoro-nucleotide
  modified_base 7: mod_base = OTHER; note = 2'O-methyl-nucleotide
  modified_base 8: mod_base = OTHER; note = 2'fluoro-nucleotide
  modified_base 9: mod_base = OTHER; note = 2'fluoro-nucleotide
  modified_base 10: mod_base = OTHER; note = 2'O-methyl-nucleotide
  modified_base 11: mod_base = OTHER; note = 2'O-methyl-nucleotide
  modified_base 12: mod_base = OTHER; note = 2'O-methyl-nucleotide
  modified_base 13: mod_base = OTHER; note = 2'O-methyl-nucleotide
  modified_base 14: mod_base = OTHER; note = 2'fluoro-nucleotide
  modified_base 15: mod_base = OTHER; note = 2'O-methyl-nucleotide
  modified_base 16: mod_base = OTHER; note = 2'fluoro-nucleotide
  modified_base 17: mod_base = OTHER; note = 2'O-methyl-nucleotide
  modified_base 18: mod_base = OTHER; note = 2'O-methyl-nucleotide
  modified_base 19: mod_base = OTHER; note = 2'O-methyl-nucleotide
  modified_base 20: mod_base = OTHER; note = 2'O-methyl-nucleotide
  modified_base 21: mod_base = OTHER; note = 2'O-methyl-nucleotide phosphorothioate
  modified_base 22: mod_base = OTHER; note = 2'O-methyl-nucleotide phosphorothioate
  modified_base 23: mod_base = OTHER; note = 2'O-methyl-nucleotide
ttcaactggtttgtagactattt

SEQ ID NO: 51 - RNA, 23 nt, synthetic construct
  source 1..23: mol_type = other RNA
  modified_base 1: mod_base = OTHER; note = Inverted abasic nucleotide phosphorothioate
  modified_base 2: mod_base = OTHER; note = 2'O-methyl-nucleotide phosphorothioate
  modified_base 3: mod_base = OTHER; note = 2'O-methyl-nucleotide
  modified_base 4: mod_base = OTHER; note = 2'O-methyl-nucleotide
  modified_base 5: mod_base = OTHER; note = 2'O-methyl-nucleotide
  modified_base 6: mod_base = OTHER; note = 2'O-methyl-nucleotide
  modified_base 7: mod_base = OTHER; note = 2'O-methyl-nucleotide
  modified_base 8: mod_base = OTHER; note = 2'O-methyl-nucleotide
  modified_base 9: mod_base = OTHER; note = 2'O-methyl-nucleotide
  modified_base 10: mod_base = OTHER; note = 2'fluoro-nucleotide
  modified_base 11: mod_base = OTHER; note = 2'fluoro-nucleotide
  modified_base 12: mod_base = OTHER; note = 2'fluoro-nucleotide
  modified_base 13: mod_base = OTHER; note = 2'O-methyl-nucleotide
  modified_base 14: mod_base = OTHER; note = 2'O-methyl-nucleotide
  modified_base 15: mod_base = OTHER; note = 2'O-methyl-nucleotide
  modified_base 16: mod_base = OTHER; note = 2'O-methyl-nucleotide
  modified_base 17: mod_base = OTHER; note = 2'O-methyl-nucleotide
  modified_base 18: mod_base = OTHER; note = 2'O-methyl-nucleotide
  modified_base 19: mod_base = OTHER; note = 2'O-methyl-nucleotide
  modified_base 20: mod_base = OTHER; note = 2'O-methyl-nucleotide
  modified_base 21: mod_base = OTHER; note = 2'O-methyl-nucleotide phosphorothioate
  modified_base 22: mod_base = OTHER; note = 2'O-methyl-nucleotide phosphorothioate
  modified_base 23: mod_base = OTHER; note = Inverted abasic Cholesterol-triethylene glycol nucleotide
natagtctacaaaccagttgaan

SEQ ID NO: 52 - RNA, 21 nt, synthetic construct
  source 1..21: mol_type = other RNA
  modified_base 1: mod_base = OTHER; note = Vinyl phosphonate 2'O-methyl-nucleotide phosphorothioate
  modified_base 2: mod_base = OTHER; note = 2'fluoro-nucleotide phosphorothioate
  modified_base 3: mod_base = OTHER; note = 2'O-methyl-nucleotide phosphorothioate
  modified_base 4: mod_base = OTHER; note = 2'O-methyl-nucleotide
  modified_base 5: mod_base = OTHER; note = 2'O-methyl-nucleotide
  modified_base 6: mod_base = OTHER; note = 2'fluoro-nucleotide
  modified_base 7: mod_base = OTHER; note = 2'O-methyl-nucleotide
  modified_base 8: mod_base = OTHER; note = 2'fluoro-nucleotide
  modified_base 9: mod_base = OTHER; note = 2'fluoro-nucleotide
  modified_base 10: mod_base = OTHER; note = 2'O-methyl-nucleotide
  modified_base 11: mod_base = OTHER; note = 2'O-methyl-nucleotide
  modified_base 12: mod_base = OTHER; note = 2'O-methyl-nucleotide
  modified_base 13: mod_base = OTHER; note = 2'O-methyl-nucleotide
  modified_base 14: mod_base = OTHER; note = 2'fluoro-nucleotide
  modified_base 15: mod_base = OTHER; note = 2'O-methyl-nucleotide
  modified_base 16: mod_base = OTHER; note = 2'fluoro-nucleotide
  modified_base 17: mod_base = OTHER; note = 2'O-methyl-nucleotide
  modified_base 18: mod_base = OTHER; note = 2'O-methyl-nucleotide
  modified_base 19: mod_base = OTHER; note = 2'O-methyl-nucleotide phosphorothioate
  modified_base 20: mod_base = OTHER; note = 2'O-methyl-nucleotide phosphorothioate
  modified_base 21: mod_base = OTHER; note = 2'O-methyl-nucleotide
ttcaactggtttgtagactat

SEQ ID NO: 53 - RNA, 23 nt, synthetic construct
  source 1..23: mol_type = other RNA
  modified_base 1: mod_base = OTHER; note = Inverted abasic nucleotide phosphorothioate
  modified_base 2: mod_base = OTHER; note = 2'O-methyl-nucleotide phosphorothioate
  modified_base 3: mod_base = OTHER; note = 2'O-methyl-nucleotide
  modified_base 4: mod_base = OTHER; note = 2'O-methyl-nucleotide
  modified_base 5: mod_base = OTHER; note = 2'O-methyl-nucleotide
  modified_base 6: mod_base = OTHER; note = 2'O-methyl-nucleotide
  modified_base 7: mod_base = OTHER; note = 2'O-methyl-nucleotide
  modified_base 8: mod_base = OTHER; note = 2'O-methyl-nucleotide
  modified_base 9: mod_base = OTHER; note = 2'O-methyl-nucleotide
  modified_base 10: mod_base = OTHER; note = 2'fluoro-nucleotide
  modified_base 11: mod_base = OTHER; note = 2'fluoro-nucleotide
  modified_base 12: mod_base = OTHER; note = 2'fluoro-nucleotide
  modified_base 13: mod_base = OTHER; note = 2'O-methyl-nucleotide
  modified_base 14: mod_base = OTHER; note = 2'O-methyl-nucleotide
  modified_base 15: mod_base = OTHER; note = 2'O-methyl-nucleotide
  modified_base 16: mod_base = OTHER; note = 2'O-methyl-nucleotide
  modified_base 17: mod_base = OTHER; note = 2'O-methyl-nucleotide
  modified_base 18: mod_base = OTHER; note = 2'O-methyl-nucleotide
  modified_base 19: mod_base = OTHER; note = 2'O-methyl-nucleotide
  modified_base 20: mod_base = OTHER; note = 2'O-methyl-nucleotide
  modified_base 21: mod_base = OTHER; note = 2'O-methyl-nucleotide phosphorothioate
  modified_base 22: mod_base = OTHER; note = 2'O-methyl-nucleotide phosphorothioate
  modified_base 23: mod_base = OTHER; note = Inverted abasic Cholesterol-triethylene glycol nucleotide
natagtctacaaaccagttgaan

SEQ ID NO: 54 - RNA, 23 nt, synthetic construct
  source 1..23: mol_type = other RNA
  modified_base 1: mod_base = OTHER; note = Vinyl phosphonate 2'O-methyl-nucleotide phosphorothioate
  modified_base 2: mod_base = OTHER; note = 2'fluoro-nucleotide phosphorothioate
  modified_base 3: mod_base = OTHER; note = 2'O-methyl-nucleotide
  modified_base 4: mod_base = OTHER; note = 2'O-methyl-nucleotide
  modified_base 5: mod_base = OTHER; note = 2'O-methyl-nucleotide
  modified_base 6: mod_base = OTHER; note = 2'O-methyl-nucleotide
  modified_base 7: mod_base = OTHER; note = 2'fluoro-nucleotide
  modified_base 8: mod_base = OTHER; note = 2'O-methyl-nucleotide
  modified_base 9: mod_base = OTHER; note = 2'O-methyl-nucleotide
  modified_base 10: mod_base = OTHER; note = 2'O-methyl-nucleotide
  modified_base 11: mod_base = OTHER; note = 2'O-methyl-nucleotide
  modified_base 12: mod_base = OTHER; note = 2'fluoro-nucleotide
  modified_base 13: mod_base = OTHER; note = 2'O-methyl-nucleotide
  modified_base 14: mod_base = OTHER; note = 2'fluoro-nucleotide
  modified_base 15: mod_base = OTHER; note = 2'O-methyl-nucleotide
  modified_base 16: mod_base = OTHER; note = 2'O-methyl-nucleotide
  modified_base 17: mod_base = OTHER; note = 2'O-methyl-nucleotide
  modified_base 18: mod_base = OTHER; note = 2'O-methyl-nucleotide
  modified_base 19: mod_base = OTHER; note = 2'O-methyl-nucleotide
  modified_base 20: mod_base = OTHER; note = 2'O-methyl-nucleotide
  modified_base 21: mod_base = OTHER; note = 2'O-methyl-nucleotide phosphorothioate
  modified_base 22: mod_base = OTHER; note = 2'O-methyl-nucleotide phosphorothioate
  modified_base 23: mod_base = OTHER; note = 2'O-methyl-nucleotide
ttcaactggtttgtagactattt

SEQ ID NO: 55 - RNA, 21 nt, synthetic construct
  source 1..21: mol_type = other RNA
  modified_base 1: mod_base = OTHER; note = 2'O-methyl-nucleotide phosphorothioate
  modified_base 2: mod_base = OTHER; note = 2'O-methyl-nucleotide phosphorothioate
  modified_base 3: mod_base = OTHER; note = 2'O-methyl-nucleotide
  modified_base 4: mod_base = OTHER; note = 2'O-methyl-nucleotide
  modified_base 5: mod_base = OTHER; note = 2'O-methyl-nucleotide
  modified_base 6: mod_base = OTHER; note = 2'O-methyl-nucleotide
  modified_base 7: mod_base = OTHER; note = 2'fluoro-nucleotide
  modified_base 8: mod_base = OTHER; note = 2'O-methyl-nucleotide
  modified_base 9: mod_base = OTHER; note = 2'fluoro-nucleotide
  modified_base 10: mod_base = OTHER; note = 2'fluoro-nucleotide
  modified_base 11: mod_base = OTHER; note = 2'fluoro-nucleotide
  modified_base 12: mod_base = OTHER; note = 2'O-methyl-nucleotide
  modified_base 13: mod_base = OTHER; note = 2'O-methyl-nucleotide
  modified_base 14: mod_base = OTHER; note = 2'O-methyl-nucleotide
  modified_base 15: mod_base = OTHER; note = 2'O-methyl-nucleotide
  modified_base 16: mod_base = OTHER; note = 2'O-methyl-nucleotide
  modified_base 17: mod_base = OTHER; note = 2'O-methyl-nucleotide
  modified_base 18: mod_base = OTHER; note = 2'O-methyl-nucleotide
  modified_base 19: mod_base = OTHER; note = 2'O-methyl-nucleotide phosphorothioate
  modified_base 20: mod_base = OTHER; note = 2'O-methyl-nucleotide phosphorothioate
  modified_base 21: mod_base = OTHER; note = 2'O-methyl-Cholesterol-triethylene glycol nucleotide
atagtctacaaaccagttgaa

SEQ ID NO: 56 - RNA, 23 nt, synthetic construct
  source 1..23: mol_type = other RNA
  modified_base 1: mod_base = OTHER; note = Vinyl phosphonate 2'O-methyl-nucleotide phosphorothioate
  modified_base 2: mod_base = OTHER; note = 2'fluoro-nucleotide phosphorothioate
  modified_base 3: mod_base = OTHER; note = 2'O-methyl-nucleotide
  modified_base 4: mod_base = OTHER; note = 2'O-methyl-nucleotide
  modified_base 5: mod_base = OTHER; note = 2'O-methyl-nucleotide
  modified_base 6: mod_base = OTHER; note = 2'fluoro-nucleotide
  modified_base 7: mod_base = OTHER; note = 2'O-methyl-nucleotide
  modified_base 8: mod_base = OTHER; note = 2'O-methyl-nucleotide
  modified_base 9: mod_base = OTHER; note = 2'fluoro-nucleotide
  modified_base 10: mod_base = OTHER; note = 2'O-methyl-nucleotide
  modified_base 11: mod_base = OTHER; note = 2'O-methyl-nucleotide
  modified_base 12: mod_base = OTHER; note = 2'O-methyl-nucleotide
  modified_base 13: mod_base = OTHER; note = 2'O-methyl-nucleotide
  modified_base 14: mod_base = OTHER; note = 2'fluoro-nucleotide
  modified_base 15: mod_base = OTHER; note = 2'O-methyl-nucleotide
  modified_base 16: mod_base = OTHER; note = 2'fluoro-nucleotide
  modified_base 17: mod_base = OTHER; note = 2'O-methyl-nucleotide
  modified_base 18: mod_base = OTHER; note = 2'O-methyl-nucleotide
  modified_base 19: mod_base = OTHER; note = 2'O-methyl-nucleotide
  modified_base 20: mod_base = OTHER; note = 2'O-methyl-nucleotide
  modified_base 21: mod_base = OTHER; note = 2'O-methyl-nucleotide phosphorothioate
  modified_base 22: mod_base = OTHER; note = 2'O-methyl-nucleotide phosphorothioate
  modified_base 23: mod_base = OTHER; note = 2'O-methyl-nucleotide
ttcaactggtttgtagactattt

SEQ ID NO: 57 - RNA, 21 nt, synthetic construct
  source 1..21: mol_type = other RNA
  modified_base 1: mod_base = OTHER; note = 2'O-methyl-nucleotide phosphorothioate
  modified_base 2: mod_base = OTHER; note = 2'O-methyl-nucleotide phosphorothioate
  modified_base 3: mod_base = OTHER; note = 2'O-methyl-nucleotide
  modified_base 4: mod_base = OTHER; note = 2'O-methyl-nucleotide
  modified_base 5: mod_base = OTHER; note = 2'O-methyl-nucleotide
  modified_base 6: mod_base = OTHER; note = 2'O-methyl-nucleotide
  modified_base 7: mod_base = OTHER; note = 2'fluoro-nucleotide
  modified_base 8: mod_base = OTHER; note = 2'O-methyl-nucleotide
  modified_base 9: mod_base = OTHER; note = 2'fluoro-nucleotide
  modified_base 10: mod_base = OTHER; note = 2'fluoro-nucleotide
  modified_base 11: mod_base = OTHER; note = 2'fluoro-nucleotide
  modified_base 12: mod_base = OTHER; note = 2'O-methyl-nucleotide
  modified_base 13: mod_base = OTHER; note = 2'O-methyl-nucleotide
  modified_base 14: mod_base = OTHER; note = 2'O-methyl-nucleotide
  modified_base 15: mod_base = OTHER; note = 2'O-methyl-nucleotide
  modified_base 16: mod_base = OTHER; note = 2'O-methyl-nucleotide
  modified_base 17: mod_base = OTHER; note = 2'O-methyl-nucleotide
  modified_base 18: mod_base = OTHER; note = 2'O-methyl-nucleotide
  modified_base 19: mod_base = OTHER; note = 2'O-methyl-nucleotide phosphorothioate
  modified_base 20: mod_base = OTHER; note = 2'O-methyl-nucleotide phosphorothioate
  modified_base 21: mod_base = OTHER; note = 2'O-methyl-Cholesterol-triethylene glycol nucleotide
atagtctacaaaccagttgaa

SEQ ID NO: 58 - RNA, 23 nt, synthetic construct
  source 1..23: mol_type = other RNA
  modified_base 1: mod_base = OTHER; note = Vinyl phosphonate 2'O-methyl-nucleotide phosphorothioate
  modified_base 2: mod_base = OTHER; note = 2'fluoro-nucleotide phosphorothioate
  modified_base 3: mod_base = OTHER; note = 2'O-methyl-nucleotide
  modified_base 4: mod_base = OTHER; note = 2'O-methyl-nucleotide
  modified_base 5: mod_base = OTHER; note = 2'O-methyl-nucleotide
  modified_base 6: mod_base = OTHER; note = 2'fluoro-nucleotide
  modified_base 7: mod_base = OTHER; note = 2'O-methyl-nucleotide
  modified_base 8: mod_base = OTHER; note = 2'fluoro-nucleotide
  modified_base 9: mod_base = OTHER; note = 2'O-methyl-nucleotide
  modified_base 10: mod_base = OTHER; note = 2'O-methyl-nucleotide
  modified_base 11: mod_base = OTHER; note = 2'O-methyl-nucleotide
  modified_base 12: mod_base = OTHER; note = 2'O-methyl-nucleotide
  modified_base 13: mod_base = OTHER; note = 2'O-methyl-nucleotide
  modified_base 14: mod_base = OTHER; note = 2'fluoro-nucleotide
  modified_base 15: mod_base = OTHER; note = 2'O-methyl-nucleotide
  modified_base 16: mod_base = OTHER; note = 2'fluoro-nucleotide
  modified_base 17: mod_base = OTHER; note = 2'O-methyl-nucleotide
  modified_base 18: mod_base = OTHER; note = 2'O-methyl-nucleotide
  modified_base 19: mod_base = OTHER; note = 2'O-methyl-nucleotide
  modified_base 20: mod_base = OTHER; note = 2'O-methyl-nucleotide
  modified_base 21: mod_base = OTHER; note = 2'O-methyl-nucleotide phosphorothioate
  modified_base 22: mod_base = OTHER; note = 2'O-methyl-nucleotide phosphorothioate
  modified_base 23: mod_base = OTHER; note = 2'O-methyl-nucleotide
ttcaactggtttgtagactattt

SEQ ID NO: 59 - RNA, 21 nt, synthetic construct
  source 1..21: mol_type = other RNA
  modified_base 1: mod_base = OTHER; note = 2'O-methyl-nucleotide phosphorothioate
  modified_base 2: mod_base = OTHER; note = 2'O-methyl-nucleotide phosphorothioate
  modified_base 3: mod_base = OTHER; note = 2'O-methyl-nucleotide
  modified_base 4: mod_base = OTHER; note = 2'O-methyl-nucleotide
  modified_base 5: mod_base = OTHER; note = 2'O-methyl-nucleotide
  modified_base 6: mod_base = OTHER; note = 2'O-methyl-nucleotide
  modified_base 7: mod_base = OTHER; note = 2'fluoro-nucleotide
  modified_base 8: mod_base = OTHER; note = 2'O-methyl-nucleotide
  modified_base 9: mod_base = OTHER; note = 2'fluoro-nucleotide
  modified_base 10: mod_base = OTHER; note = 2'fluoro-nucleotide
  modified_base 11: mod_base = OTHER; note = 2'fluoro-nucleotide
  modified_base 12: mod_base = OTHER; note = 2'O-methyl-nucleotide
  modified_base 13: mod_base = OTHER; note = 2'O-methyl-nucleotide
  modified_base 14: mod_base = OTHER; note = 2'O-methyl-nucleotide
  modified_base 15: mod_base = OTHER; note = 2'O-methyl-nucleotide
  modified_base 16: mod_base = OTHER; note = 2'O-methyl-nucleotide
  modified_base 17: mod_base = OTHER; note = 2'O-methyl-nucleotide
  modified_base 18: mod_base = OTHER; note = 2'O-methyl-nucleotide
  modified_base 19: mod_base = OTHER; note = 2'O-methyl-nucleotide phosphorothioate
  modified_base 20: mod_base = OTHER; note = 2'O-methyl-nucleotide phosphorothioate
  modified_base 21: mod_base = OTHER; note = 2'O-methyl-Cholesterol-triethylene glycol nucleotide
atagtctacaaaccagttgaa

SEQ ID NO: 60 - RNA, 23 nt, synthetic construct
  source 1..23: mol_type = other RNA
  modified_base 1: mod_base = OTHER; note = Vinyl phosphonate 2'O-methyl-nucleotide phosphorothioate
  modified_base 2: mod_base = OTHER; note = 2'fluoro-nucleotide phosphorothioate
  modified_base 3: mod_base = OTHER; note = 2'O-methyl-nucleotide
  modified_base 4: mod_base = OTHER; note = 2'O-methyl-nucleotide
  modified_base 5: mod_base = OTHER; note = 2'O-methyl-nucleotide
  modified_base 6: mod_base = OTHER; note = 2'fluoro-nucleotide
  modified_base 7: mod_base = OTHER; note = 2'O-methyl-nucleotide
  modified_base 8: mod_base = OTHER; note = 2'O-methyl-nucleotide
  modified_base 9: mod_base = OTHER; note = 2'O-methyl-nucleotide
  modified_base 10: mod_base = OTHER; note = 2'O-methyl-nucleotide
  modified_base 11: mod_base = OTHER; note = 2'O-methyl-nucleotide
  modified_base 12: mod_base = OTHER; note = 2'O-methyl-nucleotide
  modified_base 13: mod_base = OTHER; note = 2'O-methyl-nucleotide
  modified_base 14: mod_base = OTHER; note = 2'fluoro-nucleotide
  modified_base 15: mod_base = OTHER; note = 2'O-methyl-nucleotide
  modified_base 16: mod_base = OTHER; note = 2'fluoro-nucleotide
  modified_base 17: mod_base = OTHER; note = 2'O-methyl-nucleotide
  modified_base 18: mod_base = OTHER; note = 2'O-methyl-nucleotide
  modified_base 19: mod_base = OTHER; note = 2'O-methyl-nucleotide
  modified_base 20: mod_base = OTHER; note = 2'O-methyl-nucleotide
  modified_base 21: mod_base = OTHER; note = 2'O-methyl-nucleotide phosphorothioate
  modified_base 22: mod_base = OTHER; note = 2'O-methyl-nucleotide phosphorothioate
  modified_base 23: mod_base = OTHER; note = 2'O-methyl-nucleotide
ttcaactggtttgtagactattt

SEQ ID NO: 61 - RNA, 23 nt, synthetic construct
  source 1..23: mol_type = other RNA
  modified_base 1: mod_base = OTHER; note = Inverted abasic nucleotide phosphorothioate
  modified_base 2: mod_base = OTHER; note = 2'O-methyl-nucleotide phosphorothioate
  modified_base 3: mod_base = OTHER; note = 2'O-methyl-nucleotide
  modified_base 4: mod_base = OTHER; note = 2'O-methyl-nucleotide
  modified_base 5: mod_base = OTHER; note = 2'O-methyl-nucleotide
  modified_base 6: mod_base = OTHER; note = 2'O-methyl-nucleotide
  modified_base 7: mod_base = OTHER; note = 2'O-methyl-nucleotide
  modified_base 8: mod_base = OTHER; note = 2'O-methyl-nucleotide
  modified_base 9: mod_base = OTHER; note = 2'O-methyl-nucleotide
  modified_base 10: mod_base = OTHER; note = 2'fluoro-nucleotide
  modified_base 11: mod_base = OTHER; note = 2'fluoro-nucleotide
  modified_base 12: mod_base = OTHER; note = 2'fluoro-nucleotide
  modified_base 13: mod_base = OTHER; note = 2'O-methyl-nucleotide
  modified_base 14: mod_base = OTHER; note = 2'O-methyl-nucleotide
  modified_base 15: mod_base = OTHER; note = 2'O-methyl-nucleotide
  modified_base 16: mod_base = OTHER; note = 2'O-methyl-nucleotide
  modified_base 17: mod_base = OTHER; note = 2'O-methyl-nucleotide
  modified_base 18: mod_base = OTHER; note = 2'O-methyl-nucleotide
  modified_base 19: mod_base = OTHER; note = 2'O-methyl-nucleotide
  modified_base 20: mod_base = OTHER; note = 2'O-methyl-nucleotide
  modified_base 21: mod_base = OTHER; note = 2'O-methyl-nucleotide phosphorothioate
  modified_base 22: mod_base = OTHER; note = 2'O-methyl-nucleotide phosphorothioate
  modified_base 23: mod_base = OTHER; note = Inverted abasic Cholesterol-triethylene glycol nucleotide
natagtctacaaaccagttgaan

SEQ ID NO: 62 - RNA, 21 nt, synthetic construct
  source 1..21: mol_type = other RNA
  modified_base 1: mod_base = OTHER; note = Vinyl phosphonate 2'O-methyl-nucleotide phosphorothioate
  modified_base 2: mod_base = OTHER; note = 2'fluoro-nucleotide phosphorothioate
  modified_base 3: mod_base = OTHER; note = 2'O-methyl-nucleotide
  modified_base 4: mod_base = OTHER; note = 2'O-methyl-nucleotide
  modified_base 5: mod_base = OTHER; note = 2'O-methyl-nucleotide
  modified_base 6: mod_base = OTHER; note = 2'O-methyl-nucleotide
  modified_base 7: mod_base = OTHER; note = Unlocked nucleotide
  modified_base 8: mod_base = OTHER; note = 2'O-methyl-nucleotide
  modified_base 9: mod_base = OTHER; note = 2'O-methyl-nucleotide
  modified_base 10: mod_base = OTHER; note = 2'O-methyl-nucleotide
  modified_base 11: mod_base = OTHER; note = 2'O-methyl-nucleotide
  modified_base 12: mod_base = OTHER; note = 2'O-methyl-nucleotide
  modified_base 13: mod_base = OTHER; note = 2'O-methyl-nucleotide
  modified_base 14: mod_base = OTHER; note = 2'fluoro-nucleotide
  modified_base 15: mod_base = OTHER; note = 2'O-methyl-nucleotide
  modified_base 16: mod_base = OTHER; note = 2'fluoro-nucleotide
  modified_base 17: mod_base = OTHER; note = 2'O-methyl-nucleotide
  modified_base 18: mod_base = OTHER; note = 2'O-methyl-nucleotide
  modified_base 19: mod_base = OTHER; note = 2'O-methyl-nucleotide phosphorothioate
  modified_base 20: mod_base = OTHER; note = 2'O-methyl-nucleotide phosphorothioate
  modified_base 21: mod_base = OTHER; note = 2'O-methyl-nucleotide
ttcaactggtttgtagactat

SEQ ID NO: 63 - RNA, 21 nt, synthetic construct
  source 1..21: mol_type = other RNA
  modified_base 1: mod_base = OTHER; note = Inverted abasic nucleotide phosphorothioate
  modified_base 2: mod_base = OTHER; note = 2'O-methyl-nucleotide phosphorothioate
  modified_base 3: mod_base = OTHER; note = 2'O-methyl-nucleotide
  modified_base 4: mod_base = OTHER; note = 2'O-methyl-nucleotide
  modified_base 5: mod_base = OTHER; note = 2'O-methyl-nucleotide
  modified_base 6: mod_base = OTHER; note = 2'O-methyl-nucleotide
  modified_base 7: mod_base = OTHER; note = 2'O-methyl-nucleotide
  modified_base 8: mod_base = OTHER; note = 2'fluoro-nucleotide
  modified_base 9: mod_base = OTHER; note = 2'fluoro-nucleotide
  modified_base 10: mod_base = OTHER; note = 2'fluoro-nucleotide
  modified_base 11: mod_base = OTHER; note = 2'O-methyl-nucleotide
  modified_base 12: mod_base = OTHER; note = 2'O-methyl-nucleotide
  modified_base 13: mod_base = OTHER; note = 2'O-methyl-nucleotide
  modified_base 14: mod_base = OTHER; note = 2'O-methyl-nucleotide
  modified_base 15: mod_base = OTHER; note = 2'O-methyl-nucleotide
  modified_base 16: mod_base = OTHER; note = 2'O-methyl-nucleotide
  modified_base 17: mod_base = OTHER; note = 2'O-methyl-nucleotide
  modified_base 18: mod_base = OTHER; note = 2'O-methyl-nucleotide
  modified_base 19: mod_base = OTHER; note = 2'O-methyl-nucleotide phosphorothioate
  modified_base 20: mod_base = OTHER; note = 2'O-methyl-nucleotide phosphorothioate
  modified_base 21: mod_base = OTHER; note = Inverted abasic Cholesterol-triethylene glycol nucleotide
nagtctacaaaccagttgaan

SEQ ID NO: 64 - RNA, 23 nt, synthetic construct
  source 1..23: mol_type = other RNA
  modified_base 1: mod_base = OTHER; note = Vinyl phosphonate 2'O-methyl-nucleotide phosphorothioate
  modified_base 2: mod_base = OTHER; note = 2'fluoro-nucleotide phosphorothioate
  modified_base 3: mod_base = OTHER; note = 2'O-methyl-nucleotide
  modified_base 4: mod_base = OTHER; note = 2'O-methyl-nucleotide
  modified_base 5: mod_base = OTHER; note = 2'O-methyl-nucleotide
  modified_base 6: mod_base = OTHER; note = 2'O-methyl-nucleotide
  modified_base 7: mod_base = OTHER; note = Unlocked nucleotide
  modified_base 8: mod_base = OTHER; note = 2'O-methyl-nucleotide
  modified_base 9: mod_base = OTHER; note = 2'O-methyl-nucleotide
  modified_base 10: mod_base = OTHER; note = 2'O-methyl-nucleotide
  modified_base 11: mod_base = OTHER; note = 2'O-methyl-nucleotide
  modified_base 12: mod_base = OTHER; note = 2'O-methyl-nucleotide
  modified_base 13: mod_base = OTHER; note = 2'O-methyl-nucleotide
  modified_base 14: mod_base = OTHER; note = 2'fluoro-nucleotide
  modified_base 15: mod_base = OTHER; note = 2'O-methyl-nucleotide
  modified_base 16: mod_base = OTHER; note = 2'fluoro-nucleotide
  modified_base 17: mod_base = OTHER; note = 2'O-methyl-nucleotide
  modified_base 18: mod_base = OTHER; note = 2'O-methyl-nucleotide
  modified_base 19: mod_base = OTHER; note = 2'O-methyl-nucleotide
  modified_base 20: mod_base = OTHER; note = 2'O-methyl-nucleotide
  modified_base 21: mod_base = OTHER; note = 2'O-methyl-nucleotide phosphorothioate
  modified_base 22: mod_base = OTHER; note = 2'O-methyl-nucleotide phosphorothioate
  modified_base 23: mod_base = OTHER; note = 2'O-methyl-nucleotide
ttcaactggtttgtagactattt

SEQ ID NO: 65 - DNA, 23 bp, synthetic construct
  source 1..23: mol_type = other DNA
  modified_base 1: mod_base = OTHER; note = Inverted abasic nucleotide phosphorothioate
  modified_base 2: mod_base = OTHER; note = 2'O-methyl-nucleotide phosphorothioate
  modified_base 3: mod_base = OTHER; note = 2'O-methyl-nucleotide
  modified_base 4: mod_base = OTHER; note = 2'O-methyl-nucleotide
  modified_base 5: mod_base = OTHER; note = 2'O-methyl-nucleotide
  modified_base 6: mod_base = OTHER; note = 2'O-methyl-nucleotide
  modified_base 7: mod_base = OTHER; note = 2'O-methyl-nucleotide
  modified_base 8: mod_base = OTHER; note = 2'O-methyl-nucleotide
  modified_base 9: mod_base = OTHER; note = 2'O-methyl-nucleotide
  modified_base 10: mod_base = OTHER; note = 2'fluoro-nucleotide
  modified_base 11: mod_base = OTHER; note = 2'fluoro-nucleotide
  modified_base 13: mod_base = OTHER; note = 2'O-methyl-nucleotide
  modified_base 14: mod_base = OTHER; note = 2'O-methyl-nucleotide
  modified_base 15: mod_base = OTHER; note = 2'O-methyl-nucleotide
  modified_base 16: mod_base = OTHER; note = 2'O-methyl-nucleotide
  modified_base 17: mod_base = OTHER; note = 2'O-methyl-nucleotide
  modified_base 18: mod_base = OTHER; note = 2'O-methyl-nucleotide
  modified_base 19: mod_base = OTHER; note = 2'O-methyl-nucleotide
  modified_base 20: mod_base = OTHER; note = 2'O-methyl-nucleotide
  modified_base 21: mod_base = OTHER; note = 2'O-methyl-nucleotide phosphorothioate
  modified_base 22: mod_base = OTHER; note = 2'O-methyl-nucleotide phosphorothioate
  modified_base 23: mod_base = OTHER; note = Inverted abasic Cholesterol-triethylene glycol nucleotide
  misc_feature 1..11: note = RNA
  misc_feature 12: note = DNA
  misc_feature 13..23: note = RNA
natagtctacaaaccagttgaan

SEQ ID NO: 66 - RNA, 21 nt, synthetic construct
  source 1..21: mol_type = other RNA
  modified_base 1: mod_base = OTHER; note = Vinyl phosphonate 2'O-methyl-nucleotide phosphorothioate
  modified_base 2: mod_base = OTHER; note = 2'fluoro-nucleotide phosphorothioate
  modified_base 3: mod_base = OTHER; note = 2'O-methyl-nucleotide
  modified_base 4: mod_base = OTHER; note = 2'O-methyl-nucleotide
  modified_base 5: mod_base = OTHER; note = 2'O-methyl-nucleotide
  modified_base 6: mod_base = OTHER; note = 2'fluoro-nucleotide
  modified_base 7: mod_base = OTHER; note = 2'O-methyl-nucleotide
  modified_base 8: mod_base = OTHER; note = 2'fluoro-nucleotide
  modified_base 9: mod_base = OTHER; note = 2'fluoro-nucleotide
  modified_base 10: mod_base = OTHER; note = 2'O-methyl-nucleotide
  modified_base 11: mod_base = OTHER; note = 2'O-methyl-nucleotide
  modified_base 12: mod_base = OTHER; note = 2'O-methyl-nucleotide
  modified_base 13: mod_base = OTHER; note = 2'O-methyl-nucleotide
  modified_base 14: mod_base = OTHER; note = 2'fluoro-nucleotide
  modified_base 15: mod_base = OTHER; note = 2'O-methyl-nucleotide
  modified_base 16: mod_base = OTHER; note = 2'fluoro-nucleotide
  modified_base 17: mod_base = OTHER; note = 2'O-methyl-nucleotide
  modified_base 18: mod_base = OTHER; note = 2'O-methyl-nucleotide
  modified_base 19: mod_base = OTHER; note = 2'O-methyl-nucleotide phosphorothioate
  modified_base 20: mod_base = OTHER; note = 2'O-methyl-nucleotide phosphorothioate
  modified_base 21: mod_base = OTHER; note = 2'O-methyl-nucleotide
ttcaactggtttgtagactat

SEQ ID NO: 67 - RNA, 23 nt, synthetic construct
  source 1..23: mol_type = other RNA
  modified_base 1: mod_base = OTHER; note = Inverted abasic nucleotide phosphorothioate
  modified_base 2: mod_base = OTHER; note = 2'O-methyl-nucleotide phosphorothioate
  modified_base 3: mod_base = OTHER; note = 2'O-methyl-nucleotide
  modified_base 4: mod_base = OTHER; note = 2'O-methyl-nucleotide
  modified_base 5: mod_base = OTHER; note = 2'O-methyl-nucleotide
  modified_base 6: mod_base = OTHER; note = 2'O-methyl-nucleotide
  modified_base 7: mod_base = OTHER; note = 2'O-methyl-nucleotide
  modified_base 8: mod_base = OTHER; note = 2'O-methyl-nucleotide
  modified_base 9: mod_base = OTHER; note = 2'O-methyl-nucleotide
  modified_base 10: mod_base = OTHER; note = 2'fluoro-nucleotide
  modified_base 11: mod_base = OTHER; note = 2'fluoro-nucleotide
  modified_base 12: mod_base = OTHER; note = 2'fluoro-nucleotide
  modified_base 13: mod_base = OTHER; note = 2'O-methyl-nucleotide
  modified_base 14: mod_base = OTHER; note = 2'O-methyl-nucleotide
  modified_base 15: mod_base = OTHER; note = 2'O-methyl-nucleotide
  modified_base 16: mod_base = OTHER; note = 2'O-methyl-nucleotide
  modified_base 17: mod_base = OTHER; note = 2'O-methyl-nucleotide
  modified_base 18: mod_base = OTHER; note = 2'O-methyl-nucleotide
  modified_base 19: mod_base = OTHER; note = 2'O-methyl-nucleotide
  modified_base 20: mod_base = OTHER; note = 2'O-methyl-nucleotide
  modified_base 21: mod_base = OTHER; note = 2'O-methyl-nucleotide phosphorothioate
  modified_base 22: mod_base = OTHER; note = 2'O-methyl-nucleotide phosphorothioate
  modified_base 23: mod_base = OTHER; note = Inverted abasic Cholesterol-triethylene glycol nucleotide
natagtctacaaaccagttgaan

SEQ ID NO: 68 - RNA, 21 nt, synthetic construct
  source 1..21: mol_type = other RNA
  modified_base 1: mod_base = OTHER; note = Vinyl phosphonate 2'O-methyl-nucleotide phosphorothioate
  modified_base 2: mod_base = OTHER; note = 2'fluoro-nucleotide phosphorothioate
  modified_base 3: mod_base = OTHER; note = 2'O-methyl-nucleotide phosphorothioate
  modified_base 4: mod_base = OTHER; note = 2'O-methyl-nucleotide
  modified_base 5: mod_base = OTHER; note = 2'O-methyl-nucleotide
  modified_base 6: mod_base = OTHER; note = 2'fluoro-nucleotide
  modified_base 7: mod_base = OTHER; note = 2'O-methyl-nucleotide
  modified_base 8: mod_base = OTHER; note = 2'fluoro-nucleotide
  modified_base 9: mod_base = OTHER; note = 2'fluoro-nucleotide
  modified_base 10: mod_base = OTHER; note = 2'O-methyl-nucleotide
  modified_base 11: mod_base = OTHER; note = 2'O-methyl-nucleotide
  modified_base 12: mod_base = OTHER; note = 2'O-methyl-nucleotide
  modified_base 13: mod_base = OTHER; note = 2'O-methyl-nucleotide
  modified_base 14: mod_base = OTHER; note = 2'fluoro-nucleotide
  modified_base 15: mod_base = OTHER; note = 2'O-methyl-nucleotide
  modified_base 16: mod_base = OTHER; note = 2'fluoro-nucleotide
  modified_base 17: mod_base = OTHER; note = 2'O-methyl-nucleotide
  modified_base 18: mod_base = OTHER; note = 2'O-methyl-nucleotide
  modified_base 19: mod_base = OTHER; note = 2'O-methyl-nucleotide
  modified_base 20: mod_base = OTHER; note = 2'O-methyl-nucleotide phosphorothioate
  modified_base 21: mod_base = OTHER; note = 2'O-methyl-nucleotide
ttcaactggtttgtagactat

SEQ ID NO: 69 - RNA, 19 nt, synthetic construct
  source 1..19: mol_type = other RNA
  modified_base 1: mod_base = OTHER; note = 2'O-methyl-nucleotide phosphorothioate
  modified_base 2: mod_base = OTHER; note = 2'O-methyl-nucleotide phosphorothioate
  modified_base 3: mod_base = OTHER; note = 2'fluoro-nucleotide
  modified_base 4: mod_base = OTHER; note = 2'O-methyl-nucleotide
  modified_base 5: mod_base = OTHER; note = 2'O-methyl-nucleotide
  modified_base 6: mod_base = OTHER; note = 2'O-methyl-nucleotide
  modified_base 7: mod_base = OTHER; note = 2'fluoro-nucleotide
  modified_base 8: mod_base = OTHER; note = 2'fluoro-nucleotide
  modified_base 9: mod_base = OTHER; note = 2'fluoro-nucleotide
  modified_base 10: mod_base = OTHER; note = 2'O-methyl-nucleotide
  modified_base 11: mod_base = OTHER; note = 2'O-methyl-nucleotide
  modified_base 12: mod_base = OTHER; note = 2'fluoro-nucleotide
  modified_base 13: mod_base = OTHER; note = 2'O-methyl-nucleotide
  modified_base 14: mod_base = OTHER; note = 2'O-methyl-nucleotide
  modified_base 15: mod_base = OTHER; note = 2'O-methyl-nucleotide
  modified_base 16: mod_base = OTHER; note = 2'O-methyl-nucleotide
  modified_base 17: mod_base = OTHER; note = 2'fluoro-nucleotide phosphorothioate
  modified_base 18: mod_base = OTHER; note = 2'O-methyl-nucleotide phosphorothioate
  modified_base 19: mod_base = OTHER; note = 2'O-methyl-Cholesterol-triethylene glycol nucleotide
agtctacaaaccagttgaa

SEQ ID NO: 70 - RNA, 21 nt, synthetic construct
  source 1..21: mol_type = other RNA
  modified_base 1: mod_base = OTHER; note = Vinyl phosphonate 2'O-methyl-nucleotide phosphorothioate
  modified_base 2: mod_base = OTHER; note = 2'fluoro-nucleotide phosphorothioate
  modified_base 3: mod_base = OTHER; note = 2'O-methyl-nucleotide phosphorothioate
  modified_base 4: mod_base = OTHER; note = 2'O-methyl-nucleotide
  modified_base 5: mod_base = OTHER; note = 2'O-methyl-nucleotide
  modified_base 6: mod_base = OTHER; note = 2'fluoro-nucleotide
  modified_base 7: mod_base = OTHER; note = Unlocked nucleotide
  modified_base 8: mod_base = OTHER; note = 2'O-methyl-nucleotide
  modified_base 9: mod_base = OTHER; note = 2'O-methyl-nucleotide
  modified_base 10: mod_base = OTHER; note = 2'O-methyl-nucleotide
  modified_base 11: mod_base = OTHER; note = 2'O-methyl-nucleotide
  modified_base 12: mod_base = OTHER; note = 2'O-methyl-nucleotide
  modified_base 13: mod_base = OTHER; note = 2'O-methyl-nucleotide
  modified_base 14: mod_base = OTHER; note = 2'fluoro-nucleotide
  modified_base 15: mod_base = OTHER; note = 2'O-methyl-nucleotide
  modified_base 16: mod_base = OTHER; note = 2'fluoro-nucleotide
  modified_base 17: mod_base = OTHER; note = 2'O-methyl-nucleotide
  modified_base 18: mod_base = OTHER; note = 2'O-methyl-nucleotide
  modified_base 19: mod_base = OTHER; note = 2'O-methyl-nucleotide
  modified_base 20: mod_base = OTHER; note = 2'O-methyl-nucleotide phosphorothioate
  modified_base 21: mod_base = OTHER; note = 2'O-methyl-nucleotide
ttcaactggtttgtagactat

SEQ ID NO: 71 - RNA, 20 nt, synthetic construct
  source 1..20: mol_type = other RNA
  modified_base 1: mod_base = OTHER; note = Inverted abasic nucleotide phosphorothioate
  modified_base 2: mod_base = OTHER; note = 2'O-methyl-nucleotide phosphorothioate
  modified_base 3: mod_base = OTHER; note = 2'O-methyl-nucleotide
  modified_base 4: mod_base = OTHER; note = 2'fluoro-nucleotide
  modified_base 5: mod_base = OTHER; note = 2'O-methyl-nucleotide
  modified_base 6: mod_base = OTHER; note = 2'O-methyl-nucleotide
  modified_base 7: mod_base = OTHER; note = 2'O-methyl-nucleotide
  modified_base 8: mod_base = OTHER; note = 2'fluoro-nucleotide
  modified_base 9: mod_base = OTHER; note = 2'fluoro-nucleotide
  modified_base 10: mod_base = OTHER; note = 2'fluoro-nucleotide
  modified_base 11: mod_base = OTHER; note = 2'O-methyl-nucleotide
  modified_base 12: mod_base = OTHER; note = 2'O-methyl-nucleotide
  modified_base 13: mod_base = OTHER; note = 2'fluoro-nucleotide
  modified_base 14: mod_base = OTHER; note = 2'O-methyl-nucleotide
  modified_base 15: mod_base = OTHER; note = 2'O-methyl-nucleotide
  modified_base 16: mod_base = OTHER; note = 2'O-methyl-nucleotide
  modified_base 17: mod_base = OTHER; note = 2'O-methyl-nucleotide
  modified_base 18: mod_base = OTHER; note = 2'fluoro-nucleotide phosphorothioate
  modified_base 19: mod_base = OTHER; note = 2'O-methyl-nucleotide phosphorothioate
  modified_base 20: mod_base = OTHER; note = 2'O-methyl-Cholesterol-triethylene glycol nucleotide
nagtctacaaaccagttgaa

SEQ ID NO: 72 - RNA, 21 nt, synthetic construct
  source 1..21: mol_type = other RNA
  modified_base 1: mod_base = OTHER; note = Vinyl phosphonate 2'O-methyl-nucleotide phosphorothioate
  modified_base 2: mod_base = OTHER; note = 2'fluoro-nucleotide phosphorothioate
  modified_base 3: mod_base = OTHER; note = 2'O-methyl-nucleotide
  modified_base 4: mod_base = OTHER; note = 2'O-methyl-nucleotide
  modified_base 5: mod_base = OTHER; note = 2'O-methyl-nucleotide
  modified_base 6: mod_base = OTHER; note = 2'fluoro-nucleotide
  modified_base 7: mod_base = OTHER; note = Unlocked nucleotide
  modified_base 8: mod_base = OTHER; note = 2'O-methyl-nucleotide
  modified_base 9: mod_base = OTHER; note = 2'O-methyl-nucleotide
  modified_base 10: mod_base = OTHER; note = 2'O-methyl-nucleotide
  modified_base 11: mod_base = OTHER; note = 2'O-methyl-nucleotide
  modified_base 12: mod_base = OTHER; note = 2'O-methyl-nucleotide
  modified_base 13: mod_base = OTHER; note = 2'O-methyl-nucleotide
  modified_base 14: mod_base = OTHER; note = 2'fluoro-nucleotide
  modified_base 15: mod_base = OTHER; note = 2'O-methyl-nucleotide
  modified_base 16: mod_base = OTHER; note = 2'fluoro-nucleotide
  modified_base 17: mod_base = OTHER; note = 2'O-methyl-nucleotide
  modified_base 18: mod_base = OTHER; note = 2'O-methyl-nucleotide
  modified_base 19: mod_base = OTHER; note = 2'O-methyl-nucleotide phosphorothioate
  modified_base 20: mod_base = OTHER; note = 2'O-methyl-nucleotide phosphorothioate
  modified_base 21: mod_base = OTHER; note = 2'O-methyl-nucleotide
ttcaactggtttgtagactat

SEQ ID NO: 73 - RNA, 20 nt, synthetic construct
  source 1..20: mol_type = other RNA
  modified_base 1: mod_base = OTHER; note = Inverted abasic nucleotide phosphorothioate
  modified_base 2: mod_base = OTHER; note = 2'O-methyl-nucleotide phosphorothioate
  modified_base 3: mod_base = OTHER; note = 2'O-methyl-nucleotide
  modified_base 4: mod_base = OTHER; note = 2'fluoro-nucleotide
  modified_base 5: mod_base = OTHER; note = 2'O-methyl-nucleotide
  modified_base 6: mod_base = OTHER; note = 2'O-methyl-nucleotide
  modified_base 7: mod_base = OTHER; note = 2'O-methyl-nucleotide
  modified_base 8: mod_base = OTHER; note = 2'fluoro-nucleotide
  modified_base 9: mod_base = OTHER; note = 2'fluoro-nucleotide
  modified_base 10: mod_base = OTHER; note = 2'fluoro-nucleotide
  modified_base 11: mod_base = OTHER; note = 2'O-methyl-nucleotide
  modified_base 12: mod_base = OTHER; note = 2'O-methyl-nucleotide
  modified_base 13: mod_base = OTHER; note = 2'fluoro-nucleotide
  modified_base 14: mod_base = OTHER; note = 2'O-methyl-nucleotide
  modified_base 15: mod_base = OTHER; note = 2'O-methyl-nucleotide
  modified_base 16: mod_base = OTHER; note = 2'O-methyl-nucleotide
  modified_base 17: mod_base = OTHER; note = 2'O-methyl-nucleotide
  modified_base 18: mod_base = OTHER; note = 2'fluoro-nucleotide phosphorothioate
  modified_base 19: mod_base = OTHER; note = 2'O-methyl-nucleotide phosphorothioate
  modified_base 20: mod_base = OTHER; note = 2'O-methyl-Cholesterol-triethylene glycol nucleotide
nagtctacaaaccagttgaa

SEQ ID NO: 74 - RNA, 21 nt, synthetic construct
  source 1..21: mol_type = other RNA
  modified_base 1: mod_base = OTHER; note = Vinyl phosphonate 2'O-methyl-nucleotide phosphorothioate
  modified_base 2: mod_base = OTHER; note = 2'fluoro-nucleotide phosphorothioate
  modified_base 3: mod_base = OTHER; note = 2'O-methyl-nucleotide phosphorothioate
  modified_base 4: mod_base = OTHER; note = 2'O-methyl-nucleotide
  modified_base 5: mod_base = OTHER; note = 2'O-methyl-nucleotide
  modified_base 6: mod_base = OTHER; note = 2'fluoro-nucleotide
  modified_base 7: mod_base = OTHER; note = Unlocked nucleotide
  modified_base 8: mod_base = OTHER; note = 2'O-methyl-nucleotide
  modified_base 9: mod_base = OTHER; note = 2'O-methyl-nucleotide
  modified_base 10: mod_base = OTHER; note = 2'O-methyl-nucleotide
  modified_base 11: mod_base = OTHER; note = 2'O-methyl-nucleotide
  modified_base 12: mod_base = OTHER; note = 2'O-methyl-nucleotide
  modified_base 13: mod_base = OTHER; note = 2'O-methyl-nucleotide
  modified_base 14: mod_base = OTHER; note = 2'fluoro-nucleotide
  modified_base 15: mod_base = OTHER; note = 2'O-methyl-nucleotide
  modified_base 16: mod_base = OTHER; note = 2'fluoro-nucleotide
  modified_base 17: mod_base = OTHER; note = 2'O-methyl-nucleotide
  modified_base 18: mod_base = OTHER; note = 2'O-methyl-nucleotide
  modified_base 19: mod_base = OTHER; note = 2'O-methyl-nucleotide
  modified_base 20: mod_base = OTHER; note = 2'O-methyl-nucleotide phosphorothioate
  modified_base 21: mod_base = OTHER; note = 2'O-methyl-nucleotide
ttcaactggtttgtagactat

SEQ ID NO: 75 - RNA, 21 nt, synthetic construct
  source 1..21: mol_type = other RNA
  modified_base 1: mod_base = OTHER; note = Inverted abasic nucleotide phosphorothioate
  modified_base 2: mod_base = OTHER; note = 2'O-methyl-nucleotide phosphorothioate
  modified_base 3: mod_base = OTHER; note = 2'O-methyl-nucleotide
  modified_base 4: mod_base = OTHER; note = 2'O-methyl-nucleotide
  modified_base 5: mod_base = OTHER; note = 2'O-methyl-nucleotide
  modified_base 6: mod_base = OTHER; note = 2'O-methyl-nucleotide
  modified_base 7: mod_base = OTHER; note = 2'O-methyl-nucleotide
  modified_base 8: mod_base = OTHER; note = 2'fluoro-nucleotide
  modified_base 9: mod_base = OTHER; note = 2'fluoro-nucleotide
  modified_base 10: mod_base = OTHER; note = 2'fluoro-nucleotide
  modified_base 11: mod_base = OTHER; note = 2'O-methyl-nucleotide
  modified_base 12: mod_base = OTHER; note = 2'O-methyl-nucleotide
  modified_base 13: mod_base = OTHER; note = 2'O-methyl-nucleotide
  modified_base 14: mod_base = OTHER; note = 2'O-methyl-nucleotide
  modified_base 15: mod_base = OTHER; note = 2'O-methyl-nucleotide
  modified_base 16: mod_base = OTHER; note = 2'O-methyl-nucleotide
  modified_base 17: mod_base = OTHER; note = 2'O-methyl-nucleotide
  modified_base 18: mod_base = OTHER; note = 2'O-methyl-nucleotide
  modified_base 19: mod_base = OTHER; note = 2'O-methyl-nucleotide phosphorothioate
  modified_base 20: mod_base = OTHER; note = 2'O-methyl-nucleotide phosphorothioate
  modified_base 21: mod_base = OTHER; note = Inverted abasic Cholesterol-triethylene glycol nucleotide
nagtctacaaaccagttgaan

SEQ ID NO: 76 - RNA, 21 nt, synthetic construct
  source 1..21: mol_type = other RNA
  modified_base 1: mod_base = OTHER; note = Vinyl phosphonate 2'O-methyl-nucleotide phosphorothioate
  modified_base 2: mod_base = OTHER; note = 2'fluoro-nucleotide phosphorothioate
  modified_base 3: mod_base = OTHER; note = 2'O-methyl-nucleotide
  modified_base 4: mod_base = OTHER; note = 2'O-methyl-nucleotide
  modified_base 5: mod_base = OTHER; note = 2'O-methyl-nucleotide
  modified_base 6: mod_base = OTHER; note = 2'fluoro-nucleotide
  modified_base 7: mod_base = OTHER; note = 2'O-methyl-nucleotide
  modified_base 8: mod_base = OTHER; note = 2'O-methyl-nucleotide
  modified_base 9: mod_base = OTHER; note = 2'fluoro-nucleotide
  modified_base 10: mod_base = OTHER; note = 2'O-methyl-nucleotide
  modified_base 11: mod_base = OTHER; note = 2'O-methyl-nucleotide
  modified_base 12: mod_base = OTHER; note = 2'O-methyl-nucleotide
  modified_base 13: mod_base = OTHER; note = 2'O-methyl-nucleotide
  modified_base 14: mod_base = OTHER; note = 2'fluoro-nucleotide
  modified_base 15: mod_base = OTHER; note = 2'O-methyl-nucleotide
  modified_base 16: mod_base = OTHER; note = 2'fluoro-nucleotide
  modified_base 17: mod_base = OTHER; note = 2'O-methyl-nucleotide
  modified_base 18: mod_base = OTHER; note = 2'O-methyl-nucleotide
  modified_base 19: mod_base = OTHER; note = 2'O-methyl-nucleotide phosphorothioate
  modified_base 20: mod_base = OTHER; note = 2'O-methyl-nucleotide phosphorothioate
  modified_base 21: mod_base = OTHER; note = 2'O-methyl-nucleotide
ttcaactggtttgtagactat

SEQ ID NO: 77 - RNA, 23 nt, synthetic construct
  source 1..23: mol_type = other RNA
  modified_base 1: mod_base = OTHER; note = Inverted abasic nucleotide phosphorothioate
  modified_base 2: mod_base = OTHER; note = 2'O-methyl-nucleotide phosphorothioate
  modified_base 3: mod_base = OTHER; note = 2'O-methyl-nucleotide
  modified_base 4: mod_base = OTHER; note = 2'O-methyl-nucleotide
  modified_base 5: mod_base = OTHER; note = 2'O-methyl-nucleotide
  modified_base 6: mod_base = OTHER; note = 2'O-methyl-nucleotide
  modified_base 7: mod_base = OTHER; note = 2'O-methyl-nucleotide
  modified_base 8: mod_base = OTHER; note = 2'O-methyl-nucleotide
  modified_base 9: mod_base = OTHER; note = 2'O-methyl-nucleotide
  modified_base 10: mod_base = OTHER; note = 2'fluoro-nucleotide
  modified_base 11: mod_base = OTHER; note = 2'fluoro-nucleotide
  modified_base 12: mod_base = OTHER; note = 2'fluoro-nucleotide
  modified_base 13: mod_base = OTHER; note = 2'O-methyl-nucleotide
  modified_base 14: mod_base = OTHER; note = 2'O-methyl-nucleotide
  modified_base 15: mod_base = OTHER; note = 2'O-methyl-nucleotide
  modified_base 16: mod_base = OTHER; note = 2'O-methyl-nucleotide
  modified_base 17: mod_base = OTHER; note = 2'O-methyl-nucleotide
  modified_base 18: mod_base = OTHER; note = 2'O-methyl-nucleotide
  modified_base 19: mod_base = OTHER; note = 2'O-methyl-nucleotide
  modified_base 20: mod_base = OTHER; note = 2'O-methyl-nucleotide
  modified_base 21: mod_base = OTHER; note = 2'O-methyl-nucleotide
  modified_base 22: mod_base = OTHER; note = 2'O-methyl-nucleotide phosphorothioate
  modified_base 23: mod_base = OTHER; note = Inverted abasic Cholesterol-triethylene glycol nucleotide phosphorothioate
natagtctacaaaccagttgaan

SEQ ID NO: 78 - RNA, 21 nt, synthetic construct
  source 1..21: mol_type = other RNA
  modified_base 1: mod_base = OTHER; note = Vinyl phosphonate 2'O-methyl-nucleotide phosphorothioate
  modified_base 2: mod_base = OTHER; note = 2'fluoro-nucleotide phosphorothioate
  modified_base 3: mod_base = OTHER; note = 2'O-methyl-nucleotide
  modified_base 4: mod_base = OTHER; note = 2'O-methyl-nucleotide
  modified_base 5: mod_base = OTHER; note = 2'O-methyl-nucleotide
  modified_base 6: mod_base = OTHER; note = 2'O-methyl-nucleotide
  modified_base 7: mod_base = OTHER; note = Unlocked nucleotide
  modified_base 8: mod_base = OTHER; note = 2'O-methyl-nucleotide
  modified_base 9: mod_base = OTHER; note = 2'O-methyl-nucleotide
  modified_base 10: mod_base = OTHER; note = 2'O-methyl-nucleotide
  modified_base 11: mod_base = OTHER; note = 2'O-methyl-nucleotide
  modified_base 12: mod_base = OTHER; note = 2'O-methyl-nucleotide
  modified_base 13: mod_base = OTHER; note = 2'O-methyl-nucleotide
  modified_base 14: mod_base = OTHER; note = 2'fluoro-nucleotide
  modified_base 15: mod_base = OTHER; note = 2'O-methyl-nucleotide
  modified_base 16: mod_base = OTHER; note = 2'fluoro-nucleotide
  modified_base 17: mod_base = OTHER; note = 2'O-methyl-nucleotide
  modified_base 18: mod_base = OTHER; note = 2'O-methyl-nucleotide
  modified_base 19: mod_base = OTHER; note = 2'O-methyl-nucleotide phosphorothioate
  modified_base 20: mod_base = OTHER; note = 2'O-methyl-nucleotide phosphorothioate
  modified_base 21: mod_base = OTHER; note = 2'O-methyl-nucleotide
ttcaactggtttgtagactat

SEQ ID NO: 79 - RNA, 23 nt, synthetic construct
  source 1..23: mol_type = other RNA
  modified_base 1: mod_base = OTHER; note = Inverted abasic nucleotide phosphorothioate
  modified_base 2: mod_base = OTHER; note = 2'O-methyl-nucleotide phosphorothioate
  modified_base 3: mod_base = OTHER; note = 2'O-methyl-nucleotide
  modified_base 4: mod_base = OTHER; note = 2'O-methyl-nucleotide
  modified_base 5: mod_base = OTHER; note = 2'O-methyl-nucleotide
  modified_base 6: mod_base = OTHER; note = 2'O-methyl-nucleotide
  modified_base 7: mod_base = OTHER; note = 2'O-methyl-nucleotide
  modified_base 8: mod_base = OTHER; note = 2'O-methyl-nucleotide
  modified_base 9: mod_base = OTHER; note = 2'O-methyl-nucleotide
  modified_base 10: mod_base = OTHER; note = 2'fluoro-nucleotide
  modified_base 11: mod_base = OTHER; note = 2'fluoro-nucleotide
  modified_base 12: mod_base = OTHER; note = 2'fluoro-nucleotide
  modified_base 13: mod_base = OTHER; note = 2'O-methyl-nucleotide
  modified_base 14: mod_base = OTHER; note = 2'O-methyl-nucleotide
  modified_base 15: mod_base = OTHER; note = 2'O-methyl-nucleotide
  modified_base 16: mod_base = OTHER; note = 2'O-methyl-nucleotide
  modified_base 17: mod_base = OTHER; note = 2'O-methyl-nucleotide
  modified_base 18: mod_base = OTHER; note = 2'O-methyl-nucleotide
  modified_base 19: mod_base = OTHER; note = 2'O-methyl-nucleotide
  modified_base 20: mod_base = OTHER; note = 2'O-methyl-nucleotide
  modified_base 21: mod_base = OTHER; note = 2'O-methyl-nucleotide
  modified_base 22: mod_base = OTHER; note = 2'O-methyl-nucleotide phosphorothioate
  modified_base 23: mod_base = OTHER; note = Inverted abasic Cholesterol-triethylene glycol nucleotide phosphorothioate
natagtctacaaaccagttgaan

SEQ ID NO: 80 - RNA, 21 nt, synthetic construct
  source 1..21: mol_type = other RNA
  modified_base 1: mod_base = OTHER; note = Vinyl phosphonate 2'O-methyl-nucleotide phosphorothioate
  modified_base 2: mod_base = OTHER; note = 2'fluoro-nucleotide phosphorothioate
  modified_base 3: mod_base = OTHER; note = 2'O-methyl-nucleotide
  modified_base 4: mod_base = OTHER; note = 2'O-methyl-nucleotide
  modified_base 5: mod_base = OTHER; note = 2'O-methyl-nucleotide
  modified_base 6: mod_base = OTHER; note = 2'fluoro-nucleotide
  modified_base 7: mod_base = OTHER; note = Unlocked nucleotide
  modified_base 8: mod_base = OTHER; note = 2'O-methyl-nucleotide
  modified_base 9: mod_base = OTHER; note = 2'O-methyl-nucleotide
  modified_base 10: mod_base = OTHER; note = 2'O-methyl-nucleotide
  modified_base 11: mod_base = OTHER; note = 2'O-methyl-nucleotide
  modified_base 12: mod_base = OTHER; note = 2'O-methyl-nucleotide
  modified_base 13: mod_base = OTHER; note = 2'O-methyl-nucleotide
  modified_base 14: mod_base = OTHER; note = 2'fluoro-nucleotide
  modified_base 15: mod_base = OTHER; note = 2'O-methyl-nucleotide
  modified_base 16: mod_base = OTHER; note = 2'fluoro-nucleotide
  modified_base 17: mod_base = OTHER; note = 2'O-methyl-nucleotide
  modified_base 18: mod_base = OTHER; note = 2'O-methyl-nucleotide
  modified_base 19: mod_base = OTHER; note = 2'O-methyl-nucleotide phosphorothioate
  modified_base 20: mod_base = OTHER; note = 2'O-methyl-nucleotide phosphorothioate
  modified_base 21: mod_base = OTHER; note = 2'O-methyl-nucleotide
ttcaactggtttgtagactat

SEQ ID NO: 81 - RNA, 23 nt, synthetic construct
  source 1..23: mol_type = other RNA
  modified_base 1: mod_base = OTHER; note = Inverted abasic nucleotide phosphorothioate
  modified_base 2: mod_base = OTHER; note = 2'O-methyl-nucleotide phosphorothioate
  modified_base 3: mod_base = OTHER; note = 2'O-methyl-nucleotide
  modified_base 4: mod_base = OTHER; note = 2'O-methyl-nucleotide
  modified_base 5: mod_base = OTHER; note = 2'O-methyl-nucleotide
  modified_base 6: mod_base = OTHER; note = 2'O-methyl-nucleotide
  modified_base 7: mod_base = OTHER; note = 2'O-methyl-nucleotide
  modified_base 8: mod_base = OTHER; note = 2'O-methyl-nucleotide
  modified_base 9: mod_base = OTHER; note = 2'O-methyl-nucleotide
  modified_base 10: mod_base = OTHER; note = 2'fluoro-nucleotide
  modified_base 11: mod_base = OTHER; note = 2'fluoro-nucleotide
  modified_base 12: mod_base = OTHER; note = 2'fluoro-nucleotide
  modified_base 13: mod_base = OTHER; note = 2'O-methyl-nucleotide
  modified_base 14: mod_base = OTHER; note = 2'O-methyl-nucleotide
  modified_base 15: mod_base = OTHER; note = 2'O-methyl-nucleotide
  modified_base 16: mod_base = OTHER; note = 2'O-methyl-nucleotide
  modified_base 17: mod_base = OTHER; note = 2'O-methyl-nucleotide
  modified_base 18: mod_base = OTHER; note = 2'O-methyl-nucleotide
  modified_base 19: mod_base = OTHER; note = 2'O-methyl-nucleotide
  modified_base 20: mod_base = OTHER; note = 2'O-methyl-nucleotide
  modified_base 21: mod_base = OTHER; note = 2'O-methyl-nucleotide
  modified_base 22: mod_base = OTHER; note = 2'O-methyl-nucleotide phosphorothioate
  modified_base 23: mod_base = OTHER; note = Inverted abasic Cholesterol-triethylene glycol nucleotide phosphorothioate
natagtctacaaaccagttgaan

SEQ ID NO: 82 - RNA, 21 nt, synthetic construct
  source 1..21: mol_type = other RNA
  modified_base 1: mod_base = OTHER; note = Vinyl phosphonate 2'O-methyl-nucleotide phosphorothioate
  modified_base 2: mod_base = OTHER; note = 2'fluoro-nucleotide phosphorothioate
  modified_base 3: mod_base = OTHER; note = 2'O-methyl-nucleotide
  modified_base 4: mod_base = OTHER; note = 2'O-methyl-nucleotide
  modified_base 5: mod_base = OTHER; note = 2'O-methyl-nucleotide
  modified_base 6: mod_base = OTHER; note = 2'O-methyl-nucleotide
  modified_base 7: mod_base = OTHER; note = Unlocked nucleotide
  modified_base 8: mod_base = OTHER; note = 2'fluoro-nucleotide
  modified_base 9: mod_base = OTHER; note = 2'O-methyl-nucleotide
  modified_base 10: mod_base = OTHER; note = 2'O-methyl-nucleotide
  modified_base 11: mod_base = OTHER; note = 2'O-methyl-nucleotide
  modified_base 12: mod_base = OTHER; note = 2'O-methyl-nucleotide
  modified_base 13: mod_base = OTHER; note = 2'O-methyl-nucleotide
  modified_base 14: mod_base = OTHER; note = 2'fluoro-nucleotide
  modified_base 15: mod_base = OTHER; note = 2'O-methyl-nucleotide
  modified_base 16: mod_base = OTHER; note = 2'fluoro-nucleotide
  modified_base 17: mod_base = OTHER; note = 2'O-methyl-nucleotide
  modified_base 18: mod_base = OTHER; note = 2'O-methyl-nucleotide
  modified_base 19: mod_base = OTHER; note = 2'O-methyl-nucleotide phosphorothioate
  modified_base 20: mod_base = OTHER; note = 2'O-methyl-nucleotide phosphorothioate
  modified_base 21: mod_base = OTHER; note = 2'O-methyl-nucleotide
ttcaactggtttgtagactat

SEQ ID NO: 83 - RNA, 23 nt, synthetic construct
  source 1..23: mol_type = other RNA
  modified_base 1: mod_base = OTHER; note = Inverted abasic nucleotide phosphorothioate
  modified_base 2: mod_base = OTHER; note = 2'O-methyl-nucleotide phosphorothioate
  modified_base 3: mod_base = OTHER; note = 2'O-methyl-nucleotide
  modified_base 4: mod_base = OTHER; note = 2'O-methyl-nucleotide
  modified_base 5: mod_base = OTHER; note = 2'O-methyl-nucleotide
  modified_base 6: mod_base = OTHER; note = 2'O-methyl-nucleotide
  modified_base 7: mod_base = OTHER; note = 2'O-methyl-nucleotide
  modified_base 8: mod_base = OTHER; note = 2'O-methyl-nucleotide
  modified_base 9: mod_base = OTHER; note = 2'O-methyl-nucleotide
  modified_base 10: mod_base = OTHER; note = 2'fluoro-nucleotide
  modified_base 11: mod_base = OTHER; note = 2'fluoro-nucleotide
  modified_base 12: mod_base = OTHER; note = 2'fluoro-nucleotide
  modified_base 13: mod_base = OTHER; note = 2'O-methyl-nucleotide
  modified_base 14: mod_base = OTHER; note = 2'O-methyl-nucleotide
  modified_base 15: mod_base = OTHER; note = 2'O-methyl-nucleotide
  modified_base 16: mod_base = OTHER; note = 2'O-methyl-nucleotide
  modified_base 17: mod_base = OTHER; note = 2'O-methyl-nucleotide
  modified_base 18: mod_base = OTHER; note = 2'O-methyl-nucleotide
  modified_base 19: mod_base = OTHER; note = 2'O-methyl-nucleotide
  modified_base 20: mod_base = OTHER; note = 2'O-methyl-nucleotide
  modified_base 21: mod_base = OTHER; note = 2'O-methyl-nucleotide
  modified_base 22: mod_base = OTHER; note = 2'O-methyl-nucleotide phosphorothioate
  modified_base 23: mod_base = OTHER; note = Inverted abasic Cholesterol-triethylene glycol nucleotide phosphorothioate
natagtctacaaaccagttgaan

SEQ ID NO: 84 - RNA, 21 nt, synthetic construct
  source 1..21: mol_type = other RNA
  modified_base 1: mod_base = OTHER; note = Vinyl phosphonate 2'O-methyl-nucleotide phosphorothioate
  modified_base 2: mod_base = OTHER; note = 2'fluoro-nucleotide phosphorothioate
  modified_base 3: mod_base = OTHER; note = 2'O-methyl-nucleotide
  modified_base 4: mod_base = OTHER; note = 2'O-methyl-nucleotide
  modified_base 5: mod_base = OTHER; note = 2'O-methyl-nucleotide
  modified_base 6: mod_base = OTHER; note = 2'O-methyl-nucleotide
  modified_base 7: mod_base = OTHER; note = Unlocked nucleotide
  modified_base 8: mod_base = OTHER; note = 2'O-methyl-nucleotide
  modified_base 9: mod_base = OTHER; note = 2'fluoro-nucleotide
  modified_base 10: mod_base = OTHER; note = 2'O-methyl-nucleotide
  modified_base 11: mod_base = OTHER; note = 2'O-methyl-nucleotide
  modified_base 12: mod_base = OTHER; note = 2'O-methyl-nucleotide
  modified_base 13: mod_base = OTHER; note = 2'O-methyl-nucleotide
  modified_base 14: mod_base = OTHER; note = 2'fluoro-nucleotide
  modified_base 15: mod_base = OTHER; note = 2'O-methyl-nucleotide
  modified_base 16: mod_base = OTHER; note = 2'fluoro-nucleotide
  modified_base 17: mod_base = OTHER; note = 2'O-methyl-nucleotide
  modified_base 18: mod_base = OTHER; note = 2'O-methyl-nucleotide
  modified_base 19: mod_base = OTHER; note = 2'O-methyl-nucleotide phosphorothioate
  modified_base 20: mod_base = OTHER; note = 2'O-methyl-nucleotide phosphorothioate
  modified_base 21: mod_base = OTHER; note = 2'O-methyl-nucleotide
ttcaactggtttgtagactat

SEQ ID NO: 85 - RNA, 23 nt, synthetic construct
  source 1..23: mol_type = other RNA
  modified_base 1: mod_base = OTHER; note = Inverted abasic nucleotide phosphorothioate
  modified_base 2: mod_base = OTHER; note = 2'O-methyl-nucleotide phosphorothioate
  modified_base 3: mod_base = OTHER; note = 2'O-methyl-nucleotide
  modified_base 4: mod_base = OTHER; note = 2'O-methyl-nucleotide
  modified_base 5: mod_base = OTHER; note = 2'O-methyl-nucleotide
  modified_base 6: mod_base = OTHER; note = 2'O-methyl-nucleotide
  modified_base 7: mod_base = OTHER; note = 2'O-methyl-nucleotide
  modified_base 8: mod_base = OTHER; note = 2'O-methyl-nucleotide
  modified_base 9: mod_base = OTHER; note = 2'O-methyl-nucleotide
  modified_base 10: mod_base = OTHER; note = 2'fluoro-nucleotide
  modified_base 11: mod_base = OTHER; note = 2'fluoro-nucleotide
  modified_base 12: mod_base = OTHER; note = 2'fluoro-nucleotide
  modified_base 13: mod_base = OTHER; note = 2'O-methyl-nucleotide
  modified_base 14: mod_base = OTHER; note = 2'O-methyl-nucleotide
  modified_base 15: mod_base = OTHER; note = 2'O-methyl-nucleotide
  modified_base 16: mod_base = OTHER; note = 2'O-methyl-nucleotide
  modified_base 17: mod_base = OTHER; note = 2'O-methyl-nucleotide
  modified_base 18: mod_base = OTHER; note = 2'O-methyl-nucleotide
  modified_base 19: mod_base = OTHER; note = 2'O-methyl-nucleotide
  modified_base 20: mod_base = OTHER; note = 2'O-methyl-nucleotide
  modified_base 21: mod_base = OTHER; note = 2'O-methyl-nucleotide
  modified_base 22: mod_base = OTHER; note = 2'O-methyl-nucleotide phosphorothioate
  modified_base 23: mod_base = OTHER; note = Inverted abasic Cholesterol-triethylene glycol nucleotide phosphorothioate
natagtctacaaaccagttgaan

SEQ ID NO: 86 - RNA, 21 nt, synthetic construct
  source 1..21: mol_type = other RNA
  modified_base 1: mod_base = OTHER; note = Vinyl phosphonate 2'O-methyl-nucleotide phosphorothioate
  modified_base 2: mod_base = OTHER; note = 2'fluoro-nucleotide phosphorothioate
  modified_base 3: mod_base = OTHER; note = 2'O-methyl-nucleotide
  modified_base 4: mod_base = OTHER; note = 2'O-methyl-nucleotide
  modified_base 5: mod_base = OTHER; note = 2'O-methyl-nucleotide
  modified_base 6: mod_base = OTHER; note = 2'fluoro-nucleotide
  modified_base 7: mod_base = OTHER; note = Unlocked nucleotide
  modified_base 8: mod_base = OTHER; note = 2'O-methyl-nucleotide
  modified_base 9: mod_base = OTHER; note = 2'fluoro-nucleotide
  modified_base 10: mod_base = OTHER; note = 2'O-methyl-nucleotide
  modified_base 11: mod_base = OTHER; note = 2'O-methyl-nucleotide
  modified_base 12: mod_base = OTHER; note = 2'O-methyl-nucleotide
  modified_base 13: mod_base = OTHER; note = 2'O-methyl-nucleotide
  modified_base 14: mod_base = OTHER; note = 2'fluoro-nucleotide
  modified_base 15: mod_base = OTHER; note = 2'O-methyl-nucleotide
  modified_base 16: mod_base = OTHER; note = 2'fluoro-nucleotide
  modified_base 17: mod_base = OTHER; note = 2'O-methyl-nucleotide
  modified_base 18: mod_base = OTHER; note = 2'O-methyl-nucleotide
  modified_base 19: mod_base = OTHER; note = 2'O-methyl-nucleotide phosphorothioate
  modified_base 20: mod_base = OTHER; note = 2'O-methyl-nucleotide phosphorothioate
  modified_base 21: mod_base = OTHER; note = 2'O-methyl-nucleotide
ttcaactggtttgtagactat

SEQ ID NO: 87 - RNA, 23 nt, synthetic construct
  source 1..23: mol_type = other RNA
  modified_base 1: mod_base = OTHER; note = Inverted abasic nucleotide phosphorothioate
  modified_base 2: mod_base = OTHER; note = 2'O-methyl-nucleotide phosphorothioate
  modified_base 3: mod_base = OTHER; note = 2'O-methyl-nucleotide
  modified_base 4: mod_base = OTHER; note = 2'O-methyl-nucleotide
  modified_base 5: mod_base = OTHER; note = 2'O-methyl-nucleotide
  modified_base 6: mod_base = OTHER; note = 2'O-methyl-nucleotide
  modified_base 7: mod_base = OTHER; note = 2'O-methyl-nucleotide
  modified_base 8: mod_base = OTHER; note = 2'O-methyl-nucleotide
  modified_base 9: mod_base = OTHER; note = 2'O-methyl-nucleotide
  modified_base 10: mod_base = OTHER; note = 2'fluoro-nucleotide
  modified_base 11: mod_base = OTHER; note = 2'fluoro-nucleotide
  modified_base 12: mod_base = OTHER; note = 2'fluoro-nucleotide
  modified_base 13: mod_base = OTHER; note = 2'O-methyl-nucleotide
  modified_base 14: mod_base = OTHER; note = 2'O-methyl-nucleotide
  modified_base 15: mod_base = OTHER; note = 2'O-methyl-nucleotide
  modified_base 16: mod_base = OTHER; note = 2'O-methyl-nucleotide
  modified_base 17: mod_base = OTHER; note = 2'O-methyl-nucleotide
  modified_base 18: mod_base = OTHER; note = 2'O-methyl-nucleotide
  modified_base 19: mod_base = OTHER; note = 2'O-methyl-nucleotide
  modified_base 20: mod_base = OTHER; note = 2'O-methyl-nucleotide
  modified_base 21: mod_base = OTHER; note = 2'O-methyl-nucleotide
  modified_base 22: mod_base = OTHER; note = 2'O-methyl-nucleotide phosphorothioate
  modified_base 23: mod_base = OTHER; note = Inverted abasic Cholesterol-triethylene glycol nucleotide phosphorothioate
natagtctacaaaccagttgaan

SEQ ID NO: 88 - RNA, 21 nt, synthetic construct
  source 1..21: mol_type = other RNA
  modified_base 1: mod_base = OTHER; note = Vinyl phosphonate 2'O-methyl-nucleotide phosphorothioate
  modified_base 2: mod_base = OTHER; note = 2'fluoro-nucleotide phosphorothioate
  modified_base 3: mod_base = OTHER; note = 2'O-methyl-nucleotide
  modified_base 4: mod_base = OTHER; note = 2'O-methyl-nucleotide
  modified_base 5: mod_base = OTHER; note = 2'O-methyl-nucleotide
  modified_base 6: mod_base = OTHER; note = 2'O-methyl-nucleotide
  modified_base 7: mod_base = OTHER; note = Glycol thymidine
  modified_base 8: mod_base = OTHER; note = 2'O-methyl-nucleotide
  modified_base 9: mod_base = OTHER; note = 2'O-methyl-nucleotide
  modified_base 10: mod_base = OTHER; note = 2'O-methyl-nucleotide
  modified_base 11: mod_base = OTHER; note = 2'O-methyl-nucleotide
  modified_base 12: mod_base = OTHER; note = 2'O-methyl-nucleotide
  modified_base 13: mod_base = OTHER; note = 2'O-methyl-nucleotide
  modified_base 14: mod_base = OTHER; note = 2'fluoro-nucleotide
  modified_base 15: mod_base = OTHER; note = 2'O-methyl-nucleotide
  modified_base 16: mod_base = OTHER; note = 2'fluoro-nucleotide
  modified_base 17: mod_base = OTHER; note = 2'O-methyl-nucleotide
  modified_base 18: mod_base = OTHER; note = 2'O-methyl-nucleotide
  modified_base 19: mod_base = OTHER; note = 2'O-methyl-nucleotide phosphorothioate
  modified_base 20: mod_base = OTHER; note = 2'O-methyl-nucleotide phosphorothioate
  modified_base 21: mod_base = OTHER; note = 2'O-methyl-nucleotide
ttcaactggtttgtagactat

SEQ ID NO: 89 - RNA, 23 nt, synthetic construct
  source 1..23: mol_type = other RNA
  modified_base 1: mod_base = OTHER; note = Inverted abasic nucleotide phosphorothioate
  modified_base 2: mod_base = OTHER; note = 2'O-methyl-nucleotide phosphorothioate
  modified_base 3: mod_base = OTHER; note = 2'O-methyl-nucleotide
  modified_base 4: mod_base = OTHER; note = 2'O-methyl-nucleotide
  modified_base 5: mod_base = OTHER; note = 2'O-methyl-nucleotide
  modified_base 6: mod_base = OTHER; note = 2'O-methyl-nucleotide
  modified_base 7: mod_base = OTHER; note = 2'O-methyl-nucleotide
  modified_base 8: mod_base = OTHER; note = 2'O-methyl-nucleotide
  modified_base 9: mod_base = OTHER; note = 2'O-methyl-nucleotide
  modified_base 10: mod_base = OTHER; note = 2'fluoro-nucleotide
  modified_base 11: mod_base = OTHER; note = 2'fluoro-nucleotide
  modified_base 12: mod_base = OTHER; note = 2'fluoro-nucleotide
  modified_base 13: mod_base = OTHER; note = 2'O-methyl-nucleotide
  modified_base 14: mod_base = OTHER; note = 2'O-methyl-nucleotide
  modified_base 15: mod_base = OTHER; note = 2'O-methyl-nucleotide
  modified_base 16: mod_base = OTHER; note = 2'O-methyl-nucleotide
  modified_base 17: mod_base = OTHER; note = 2'O-methyl-nucleotide
  modified_base 18: mod_base = OTHER; note = 2'O-methyl-nucleotide
  modified_base 19: mod_base = OTHER; note = 2'O-methyl-nucleotide
  modified_base 20: mod_base = OTHER; note = 2'O-methyl-nucleotide
  modified_base 21: mod_base = OTHER; note = 2'O-methyl-nucleotide
  modified_base 22: mod_base = OTHER; note = 2'O-methyl-nucleotide phosphorothioate
  modified_base 23: mod_base = OTHER; note = Inverted abasic Cholesterol-triethylene glycol nucleotide phosphorothioate
natagtctacaaaccagttgaan

SEQ ID NO: 90 - DNA, 21 bp, synthetic construct
  source 1..21: mol_type = other DNA
  modified_base 1: mod_base = OTHER; note = Vinyl phosphonate 2'O-methyl-nucleotide phosphorothioate
  modified_base 2: mod_base = OTHER; note = 2'fluoro-nucleotide phosphorothioate
  modified_base 3: mod_base = OTHER; note = 2'O-methyl-nucleotide
  modified_base 4: mod_base = OTHER; note = 2'O-methyl-nucleotide
  modified_base 5: mod_base = OTHER; note = 2'O-methyl-nucleotide
  modified_base 6: mod_base = OTHER; note = 2'O-methyl-nucleotide
  modified_base 8: mod_base = OTHER; note = 2'O-methyl-nucleotide
  modified_base 9: mod_base = OTHER; note = 2'O-methyl-nucleotide
  modified_base 10: mod_base = OTHER; note = 2'O-methyl-nucleotide
  modified_base 11: mod_base = OTHER; note = 2'O-methyl-nucleotide
  modified_base 12: mod_base = OTHER; note = 2'O-methyl-nucleotide
  modified_base 13: mod_base = OTHER; note = 2'O-methyl-nucleotide
  modified_base 14: mod_base = OTHER; note = 2'fluoro-nucleotide
  modified_base 15: mod_base = OTHER; note = 2'O-methyl-nucleotide
  modified_base 16: mod_base = OTHER; note = 2'fluoro-nucleotide
  modified_base 17: mod_base = OTHER; note = 2'O-methyl-nucleotide
  modified_base 18: mod_base = OTHER; note = 2'O-methyl-nucleotide
  modified_base 19: mod_base = OTHER; note = 2'O-methyl-nucleotide phosphorothioate
  modified_base 20: mod_base = OTHER; note = 2'O-methyl-nucleotide phosphorothioate
  modified_base 21: mod_base = OTHER; note = 2'O-methyl-nucleotide
  misc_feature 1..6: note = RNA
  misc_feature 7: note = DNA
  misc_feature 8..21: note = RNA
ttcaactggtttgtagactat

SEQ ID NO: 91 - RNA, 23 nt, synthetic construct
  source 1..23: mol_type = other RNA
  modified_base 1: mod_base = OTHER; note = Inverted abasic nucleotide phosphorothioate
  modified_base 2: mod_base = OTHER; note = 2'O-methyl-nucleotide phosphorothioate
  modified_base 3: mod_base = OTHER; note = 2'O-methyl-nucleotide
  modified_base 4: mod_base = OTHER; note = 2'O-methyl-nucleotide
  modified_base 5: mod_base = OTHER; note = 2'O-methyl-nucleotide
  modified_base 6: mod_base = OTHER; note = 2'O-methyl-nucleotide
  modified_base 7: mod_base = OTHER; note = 2'O-methyl-nucleotide
  modified_base 8: mod_base = OTHER; note = 2'O-methyl-nucleotide
  modified_base 9: mod_base = OTHER; note = 2'O-methyl-nucleotide
  modified_base 10: mod_base = OTHER; note = 2'fluoro-nucleotide
  modified_base 11: mod_base = OTHER; note = 2'fluoro-nucleotide
  modified_base 12: mod_base = OTHER; note = 2'fluoro-nucleotide
  modified_base 13: mod_base = OTHER; note = 2'O-methyl-nucleotide
  modified_base 14: mod_base = OTHER; note = 2'O-methyl-nucleotide
  modified_base 15: mod_base = OTHER; note = 2'O-methyl-nucleotide
  modified_base 16: mod_base = OTHER; note = 2'O-methyl-nucleotide
  modified_base 17: mod_base = OTHER; note = 2'O-methyl-nucleotide
  modified_base 18: mod_base = OTHER; note = 2'O-methyl-nucleotide
  modified_base 19: mod_base = OTHER; note = 2'O-methyl-nucleotide
  modified_base 20: mod_base = OTHER; note = 2'O-methyl-nucleotide
  modified_base 21: mod_base = OTHER; note = 2'O-methyl-nucleotide
  modified_base 22: mod_base = OTHER; note = 2'O-methyl-nucleotide phosphorothioate
  modified_base 23: mod_base = OTHER; note = Inverted abasic Cholesterol-triethylene glycol nucleotide phosphorothioate
natagtctacaaaccagttgaan

SEQ ID NO: 92 - RNA, 21 nt, synthetic construct
  source 1..21: mol_type = other RNA
  modified_base 1: mod_base = OTHER; note = Vinyl phosphonate 2'O-methyl-nucleotide phosphorothioate
  modified_base 2: mod_base = OTHER; note = 2'fluoro-nucleotide phosphorothioate
  modified_base 3: mod_base = OTHER; note = Unlocked nucleotide
  modified_base 4: mod_base = OTHER; note = 2'O-methyl-nucleotide
  modified_base 5: mod_base = OTHER; note = 2'O-methyl-nucleotide
  modified_base 6: mod_base = OTHER; note = 2'O-methyl-nucleotide
  modified_base 7: mod_base = OTHER; note = 2'O-methyl-nucleotide
  modified_base 8: mod_base = OTHER; note = 2'O-methyl-nucleotide
  modified_base 9: mod_base = OTHER; note = 2'O-methyl-nucleotide
  modified_base 10: mod_base = OTHER; note = 2'O-methyl-nucleotide
  modified_base 11: mod_base = OTHER; note = 2'O-methyl-nucleotide
  modified_base 12: mod_base = OTHER; note = 2'O-methyl-nucleotide
  modified_base 13: mod_base = OTHER; note = 2'O-methyl-nucleotide
  modified_base 14: mod_base = OTHER; note = 2'fluoro-nucleotide
  modified_base 15: mod_base = OTHER; note = 2'O-methyl-nucleotide
  modified_base 16: mod_base = OTHER; note = 2'fluoro-nucleotide
  modified_base 17: mod_base = OTHER; note = 2'O-methyl-nucleotide
  modified_base 18: mod_base = OTHER; note = 2'O-methyl-nucleotide
  modified_base 19: mod_base = OTHER; note = 2'O-methyl-nucleotide phosphorothioate
  modified_base 20: mod_base = OTHER; note = 2'O-methyl-nucleotide phosphorothioate
  modified_base 21: mod_base = OTHER; note = 2'O-methyl-nucleotide
ttcaactggtttgtagactat

SEQ ID NO: 93 - RNA, 23 nt, synthetic construct
  source 1..23: mol_type = other RNA
  modified_base 1: mod_base = OTHER; note = Inverted abasic nucleotide phosphorothioate
  modified_base 2: mod_base = OTHER; note = 2'O-methyl-nucleotide phosphorothioate
  modified_base 3: mod_base = OTHER; note = 2'O-methyl-nucleotide
  modified_base 4: mod_base = OTHER; note = 2'O-methyl-nucleotide
  modified_base 5: mod_base = OTHER; note = 2'O-methyl-nucleotide
  modified_base 6: mod_base = OTHER; note = 2'O-methyl-nucleotide
  modified_base 7: mod_base = OTHER; note = 2'O-methyl-nucleotide
  modified_base 8: mod_base = OTHER; note = 2'O-methyl-nucleotide
  modified_base 9: mod_base = OTHER; note = 2'O-methyl-nucleotide
  modified_base 10: mod_base = OTHER; note = 2'fluoro-nucleotide
  modified_base 11: mod_base = OTHER; note = 2'fluoro-nucleotide
  modified_base 12: mod_base = OTHER; note = 2'fluoro-nucleotide
  modified_base 13: mod_base = OTHER; note = 2'O-methyl-nucleotide
  modified_base 14: mod_base = OTHER; note = 2'O-methyl-nucleotide
  modified_base 15: mod_base = OTHER; note = 2'O-methyl-nucleotide
  modified_base 16: mod_base = OTHER; note = 2'O-methyl-nucleotide
  modified_base 17: mod_base = OTHER; note = 2'O-methyl-nucleotide
  modified_base 18: mod_base = OTHER; note = 2'O-methyl-nucleotide
  modified_base 19: mod_base = OTHER; note = 2'O-methyl-nucleotide
  modified_base 20: mod_base = OTHER; note = 2'O-methyl-nucleotide
  modified_base 21: mod_base = OTHER; note = 2'O-methyl-nucleotide
  modified_base 22: mod_base = OTHER; note = 2'O-methyl-nucleotide phosphorothioate
  modified_base 23: mod_base = OTHER; note = Inverted abasic Cholesterol-triethylene glycol nucleotide phosphorothioate
natagtctacaaaccagttgaan

SEQ ID NO: 94 - RNA, 21 nt, synthetic construct
  source 1..21: mol_type = other RNA
  modified_base 1: mod_base = OTHER; note = Vinyl phosphonate 2'O-methyl-nucleotide phosphorothioate
  modified_base 2: mod_base = OTHER; note = 2'fluoro-nucleotide phosphorothioate
  modified_base 3: mod_base = OTHER; note = 2'O-methyl-nucleotide
  modified_base 4: mod_base = OTHER; note = Unlocked nucleotide
  modified_base 5: mod_base = OTHER; note = 2'O-methyl-nucleotide
  modified_base 6: mod_base = OTHER; note = 2'O-methyl-nucleotide
  modified_base 7: mod_base = OTHER; note = 2'O-methyl-nucleotide
  modified_base 8: mod_base = OTHER; note = 2'O-methyl-nucleotide
  modified_base 9: mod_base = OTHER; note = 2'O-methyl-nucleotide
  modified_base 10: mod_base = OTHER; note = 2'O-methyl-nucleotide
  modified_base 11: mod_base = OTHER; note = 2'O-methyl-nucleotide
  modified_base 12: mod_base = OTHER; note = 2'O-methyl-nucleotide
  modified_base 13: mod_base = OTHER; note = 2'O-methyl-nucleotide
  modified_base 14: mod_base = OTHER; note = 2'fluoro-nucleotide
  modified_base 15: mod_base = OTHER; note = 2'O-methyl-nucleotide
  modified_base 16: mod_base = OTHER; note = 2'fluoro-nucleotide
  modified_base 17: mod_base = OTHER; note = 2'O-methyl-nucleotide
  modified_base 18: mod_base = OTHER; note = 2'O-methyl-nucleotide
  modified_base 19: mod_base = OTHER; note = 2'O-methyl-nucleotide phosphorothioate
  modified_base 20: mod_base = OTHER; note = 2'O-methyl-nucleotide phosphorothioate
  modified_base 21: mod_base = OTHER; note = 2'O-methyl-nucleotide
ttcaactggtttgtagactat

SEQ ID NO: 95 - RNA, 23 nt, synthetic construct
  source 1..23: mol_type = other RNA
  modified_base 1: mod_base = OTHER; note = Inverted abasic nucleotide phosphorothioate
  modified_base 2: mod_base = OTHER; note = 2'O-methyl-nucleotide phosphorothioate
  modified_base 3: mod_base = OTHER; note = 2'O-methyl-nucleotide
  modified_base 4: mod_base = OTHER; note = 2'O-methyl-nucleotide
  modified_base 5: mod_base = OTHER; note = 2'O-methyl-nucleotide
  modified_base 6: mod_base = OTHER; note = 2'O-methyl-nucleotide
  modified_base 7: mod_base = OTHER; note = 2'O-methyl-nucleotide
  modified_base 8: mod_base = OTHER; note = 2'O-methyl-nucleotide
  modified_base 9: mod_base = OTHER; note = 2'O-methyl-nucleotide
  modified_base 10: mod_base = OTHER; note = 2'fluoro-nucleotide
  modified_base 11: mod_base = OTHER; note = 2'fluoro-nucleotide
  modified_base 12: mod_base = OTHER; note = 2'fluoro-nucleotide
  modified_base 13: mod_base = OTHER; note = 2'O-methyl-nucleotide
  modified_base 14: mod_base = OTHER; note = 2'O-methyl-nucleotide
  modified_base 15: mod_base = OTHER; note = 2'O-methyl-nucleotide
  modified_base 16: mod_base = OTHER; note = 2'O-methyl-nucleotide
  modified_base 17: mod_base = OTHER; note = 2'O-methyl-nucleotide
  modified_base 18: mod_base = OTHER; note = 2'O-methyl-nucleotide
  modified_base 19: mod_base = OTHER; note = 2'O-methyl-nucleotide
  modified_base 20: mod_base = OTHER; note = 2'O-methyl-nucleotide
  modified_base 21: mod_base = OTHER; note = 2'O-methyl-nucleotide
  modified_base 22: mod_base = OTHER; note = 2'O-methyl-nucleotide phosphorothioate
  modified_base 23: mod_base = OTHER; note = Inverted abasic Cholesterol-triethylene glycol nucleotide phosphorothioate
natagtctacaaaccagttgaan

SEQ ID NO: 96 - RNA, 21 nt, synthetic construct
  source 1..21: mol_type = other RNA
  modified_base 1: mod_base = OTHER; note = Vinyl phosphonate 2'O-methyl-nucleotide phosphorothioate
  modified_base 2: mod_base = OTHER; note = 2'fluoro-nucleotide phosphorothioate
  modified_base 3: mod_base = OTHER; note = 2'O-methyl-nucleotide
  modified_base 4: mod_base = OTHER; note = 2'O-methyl-nucleotide
  modified_base 5: mod_base = OTHER; note = Unlocked nucleotide
  modified_base 6: mod_base = OTHER; note = 2'O-methyl-nucleotide
  modified_base 7: mod_base = OTHER; note = 2'O-methyl-nucleotide
  modified_base 8: mod_base = OTHER; note = 2'O-methyl-nucleotide
  modified_base 9: mod_base = OTHER; note = 2'O-methyl-nucleotide
  modified_base 10: mod_base = OTHER; note = 2'O-methyl-nucleotide
  modified_base 11: mod_base = OTHER; note = 2'O-methyl-nucleotide
  modified_base 12: mod_base = OTHER; note = 2'O-methyl-nucleotide
  modified_base 13: mod_base = OTHER; note = 2'O-methyl-nucleotide
  modified_base 14: mod_base = OTHER; note = 2'fluoro-nucleotide
  modified_base 15: mod_base = OTHER; note = 2'O-methyl-nucleotide
  modified_base 16: mod_base = OTHER; note = 2'fluoro-nucleotide
  modified_base 17: mod_base = OTHER; note = 2'O-methyl-nucleotide
  modified_base 18: mod_base = OTHER; note = 2'O-methyl-nucleotide
  modified_base 19: mod_base = OTHER; note = 2'O-methyl-nucleotide phosphorothioate
  modified_base 20: mod_base = OTHER; note = 2'O-methyl-nucleotide phosphorothioate
  modified_base 21: mod_base = OTHER; note = 2'O-methyl-nucleotide
ttcaactggtttgtagactat

SEQ ID NO: 97 - RNA, 23 nt, synthetic construct
  source 1..23: mol_type = other RNA
  modified_base 1: mod_base = OTHER; note = Inverted abasic nucleotide phosphorothioate
  modified_base 2: mod_base = OTHER; note = 2'O-methyl-nucleotide phosphorothioate
  modified_base 3: mod_base = OTHER; note = 2'O-methyl-nucleotide
  modified_base 4: mod_base = OTHER; note = 2'O-methyl-nucleotide
  modified_base 5: mod_base = OTHER; note = 2'O-methyl-nucleotide
  modified_base 6: mod_base = OTHER; note = 2'O-methyl-nucleotide
  modified_base 7: mod_base = OTHER; note = 2'O-methyl-nucleotide
  modified_base 8: mod_base = OTHER; note = 2'O-methyl-nucleotide
  modified_base 9: mod_base = OTHER; note = 2'O-methyl-nucleotide
  modified_base 10: mod_base = OTHER; note = 2'fluoro-nucleotide
  modified_base 11: mod_base = OTHER; note = 2'fluoro-nucleotide
  modified_base 12: mod_base = OTHER; note = 2'fluoro-nucleotide
  modified_base 13: mod_base = OTHER; note = 2'O-methyl-nucleotide
  modified_base 14: mod_base = OTHER; note = 2'O-methyl-nucleotide
  modified_base 15: mod_base = OTHER; note = 2'O-methyl-nucleotide
  modified_base 16: mod_base = OTHER; note = 2'O-methyl-nucleotide
  modified_base 17: mod_base = OTHER; note = 2'O-methyl-nucleotide
  modified_base 18: mod_base = OTHER; note = 2'O-methyl-nucleotide
  modified_base 19: mod_base = OTHER; note = 2'O-methyl-nucleotide
  modified_base 20: mod_base = OTHER; note = 2'O-methyl-nucleotide
  modified_base 21: mod_base = OTHER; note = 2'O-methyl-nucleotide
  modified_base 22: mod_base = OTHER; note = 2'O-methyl-nucleotide phosphorothioate
  modified_base 23: mod_base = OTHER; note = Inverted abasic Cholesterol-triethylene glycol nucleotide phosphorothioate
natagtctacaaaccagttgaan

SEQ ID NO: 98 - RNA, 21 nt, synthetic construct
  source 1..21: mol_type = other RNA
  modified_base 1: mod_base = OTHER; note = Vinyl phosphonate 2'O-methyl-nucleotide phosphorothioate
  modified_base 2: mod_base = OTHER; note = 2'fluoro-nucleotide phosphorothioate
  modified_base 3: mod_base = OTHER; note = 2'O-methyl-nucleotide
  modified_base 4: mod_base = OTHER; note = 2'O-methyl-nucleotide
  modified_base 5: mod_base = OTHER; note = 2'O-methyl-nucleotide
  modified_base 6: mod_base = OTHER; note = Unlocked nucleotide
  modified_base 7: mod_base = OTHER; note = 2'O-methyl-nucleotide
  modified_base 8: mod_base = OTHER; note = 2'O-methyl-nucleotide
  modified_base 9: mod_base = OTHER; note = 2'O-methyl-nucleotide
  modified_base 10: mod_base = OTHER; note = 2'O-methyl-nucleotide
  modified_base 11: mod_base = OTHER; note = 2'O-methyl-nucleotide
  modified_base 12: mod_base = OTHER; note = 2'O-methyl-nucleotide
  modified_base 13: mod_base = OTHER; note = 2'O-methyl-nucleotide
  modified_base 14: mod_base = OTHER; note = 2'fluoro-nucleotide
  modified_base 15: mod_base = OTHER; note = 2'O-methyl-nucleotide
  modified_base 16: mod_base = OTHER; note = 2'fluoro-nucleotide
  modified_base 17: mod_base = OTHER; note = 2'O-methyl-nucleotide
  modified_base 18: mod_base = OTHER; note = 2'O-methyl-nucleotide
  modified_base 19: mod_base = OTHER; note = 2'O-methyl-nucleotide phosphorothioate
  modified_base 20: mod_base = OTHER; note = 2'O-methyl-nucleotide phosphorothioate
  modified_base 21: mod_base = OTHER; note = 2'O-methyl-nucleotide
ttcaactggtttgtagactat

SEQ ID NO: 99 - RNA, 23 nt, synthetic construct
  source 1..23: mol_type = other RNA
  modified_base 1: mod_base = OTHER; note = Inverted abasic nucleotide phosphorothioate
  modified_base 2: mod_base = OTHER; note = 2'O-methyl-nucleotide phosphorothioate
  modified_base 3: mod_base = OTHER; note = 2'O-methyl-nucleotide
  modified_base 4: mod_base = OTHER; note = 2'O-methyl-nucleotide
  modified_base 5: mod_base = OTHER; note = 2'O-methyl-nucleotide
  modified_base 6: mod_base = OTHER; note = 2'O-methyl-nucleotide
  modified_base 7: mod_base = OTHER; note = 2'O-methyl-nucleotide
  modified_base 8: mod_base = OTHER; note = 2'O-methyl-nucleotide
  modified_base 9: mod_base = OTHER; note = 2'O-methyl-nucleotide
  modified_base 10: mod_base = OTHER; note = 2'fluoro-nucleotide
  modified_base 11: mod_base = OTHER; note = 2'fluoro-nucleotide
  modified_base 12: mod_base = OTHER; note = 2'fluoro-nucleotide
  modified_base 13: mod_base = OTHER; note = 2'O-methyl-nucleotide
  modified_base 14: mod_base = OTHER; note = 2'O-methyl-nucleotide
  modified_base 15: mod_base = OTHER; note = 2'O-methyl-nucleotide
  modified_base 16: mod_base = OTHER; note = 2'O-methyl-nucleotide
  modified_base 17: mod_base = OTHER; note = 2'O-methyl-nucleotide
  modified_base 18: mod_base = OTHER; note = 2'O-methyl-nucleotide
  modified_base 19: mod_base = OTHER; note = 2'O-methyl-nucleotide
  modified_base 20: mod_base = OTHER; note = 2'O-methyl-nucleotide
  modified_base 21: mod_base = OTHER; note = 2'O-methyl-nucleotide
  modified_base 22: mod_base = OTHER; note = 2'O-methyl-nucleotide phosphorothioate
  modified_base 23: mod_base = OTHER; note = Inverted abasic Cholesterol-triethylene glycol nucleotide phosphorothioate
natagtctacaaaccagttgaan

SEQ ID NO: 100 - DNA, 21 bp, synthetic construct
  source 1..21: mol_type = other DNA
  modified_base 1: mod_base = OTHER; note = Vinyl phosphonate 2'O-methyl-nucleotide phosphorothioate
  modified_base 2: mod_base = OTHER; note = 2'fluoro-nucleotide phosphorothioate
  modified_base 3: mod_base = OTHER; note = 2'O-methyl-nucleotide
  modified_base 4: mod_base = OTHER; note = 2'O-methyl-nucleotide
  modified_base 5: mod_base = OTHER; note = 2'O-methyl-nucleotide
  modified_base 6: mod_base = OTHER; note = 2'fluoro-nucleotide
  modified_base 7: mod_base = OTHER; note = 2'O-methyl-nucleotide
  modified_base 8: mod_base = OTHER; note = 2'fluoro-nucleotide
  modified_base 9: mod_base = OTHER; note = 2'fluoro-nucleotide
  modified_base 10: mod_base = OTHER; note = 2'O-methyl-nucleotide
  modified_base 11: mod_base = OTHER; note = 2'O-methyl-nucleotide
  modified_base 12: mod_base = OTHER; note = 2'O-methyl-nucleotide
  modified_base 14: mod_base = OTHER; note = 2'fluoro-nucleotide
  modified_base 15: mod_base = OTHER; note = 2'O-methyl-nucleotide
  modified_base 16: mod_base = OTHER; note = 2'fluoro-nucleotide
  modified_base 17: mod_base = OTHER; note = 2'O-methyl-nucleotide
  modified_base 18: mod_base = OTHER; note = 2'O-methyl-nucleotide
  modified_base 19: mod_base = OTHER; note = 2'O-methyl-nucleotide phosphorothioate
  modified_base 20: mod_base = OTHER; note = 2'O-methyl-nucleotide phosphorothioate
  modified_base 21: mod_base = OTHER; note = 2'O-methyl-nucleotide
  misc_feature 1..12: note = RNA
  misc_feature 13: note = DNA
  misc_feature 14..21: note = RNA
ttcaactggtttgtagactat

SEQ ID NO: 101 - RNA, 23 nt, synthetic construct
  source 1..23: mol_type = other RNA
  modified_base 1: mod_base = OTHER; note = Inverted abasic nucleotide phosphorothioate
  modified_base 2: mod_base = OTHER; note = 2'O-methyl-nucleotide phosphorothioate
  modified_base 3: mod_base = OTHER; note = 2'O-methyl-nucleotide
  modified_base 4: mod_base = OTHER; note = 2'O-methyl-nucleotide
  modified_base 5: mod_base = OTHER; note = 2'O-methyl-nucleotide
  modified_base 6: mod_base = OTHER; note = 2'O-methyl-nucleotide
  modified_base 7: mod_base = OTHER; note = 2'O-methyl-nucleotide
  modified_base 8: mod_base = OTHER; note = 2'O-methyl-nucleotide
  modified_base 9: mod_base = OTHER; note = 2'O-methyl-nucleotide
  modified_base 10: mod_base = OTHER; note = 2'fluoro-nucleotide
  modified_base 11: mod_base = OTHER; note = 2'fluoro-nucleotide
  modified_base 12: mod_base = OTHER; note = 2'fluoro-nucleotide
  modified_base 13: mod_base = OTHER; note = 2'O-methyl-nucleotide
  modified_base 14: mod_base = OTHER; note = 2'O-methyl-nucleotide
  modified_base 15: mod_base = OTHER; note = 2'O-methyl-nucleotide
  modified_base 16: mod_base = OTHER; note = 2'O-methyl-nucleotide
  modified_base 17: mod_base = OTHER; note = 2'O-methyl-nucleotide
  modified_base 18: mod_base = OTHER; note = 2'O-methyl-nucleotide
  modified_base 19: mod_base = OTHER; note = 2'O-methyl-nucleotide
  modified_base 20: mod_base = OTHER; note = 2'O-methyl-nucleotide
  modified_base 21: mod_base = OTHER; note = 2'O-methyl-nucleotide
  modified_base 22: mod_base = OTHER; note = 2'O-methyl-nucleotide phosphorothioate
  modified_base 23: mod_base = OTHER; note = Inverted abasic Cholesterol-triethylene glycol nucleotide phosphorothioate
natagtctacaaaccagttgaan

SEQ ID NO: 102 - DNA, 21 bp, synthetic construct
  source 1..21: mol_type = other DNA
  modified_base 1: mod_base = OTHER; note = Vinyl phosphonate 2'O-methyl-nucleotide phosphorothioate
  modified_base 2: mod_base = OTHER; note = 2'fluoro-nucleotide phosphorothioate
  modified_base 3: mod_base = OTHER; note = 2'O-methyl-nucleotide
  modified_base 4: mod_base = OTHER; note = 2'O-methyl-nucleotide
  modified_base 5: mod_base = OTHER; note = 2'O-methyl-nucleotide
  modified_base 6: mod_base = OTHER; note = 2'fluoro-nucleotide
  modified_base 7: mod_base = OTHER; note = 2'O-methyl-nucleotide
  modified_base 8: mod_base = OTHER; note = 2'fluoro-nucleotide
  modified_base 9: mod_base = OTHER; note = 2'fluoro-nucleotide
  modified_base 10: mod_base = OTHER; note = 2'O-methyl-nucleotide
  modified_base 11: mod_base = OTHER; note = 2'O-methyl-nucleotide
  modified_base 12: mod_base = OTHER; note = 2'O-methyl-nucleotide
  modified_base 13: mod_base = OTHER; note = 2'O-methyl-nucleotide
  modified_base 15: mod_base = OTHER; note = 2'O-methyl-nucleotide
  modified_base 16: mod_base = OTHER; note = 2'fluoro-nucleotide
  modified_base 17: mod_base = OTHER; note = 2'O-methyl-nucleotide
  modified_base 18: mod_base = OTHER; note = 2'O-methyl-nucleotide
  modified_base 19: mod_base = OTHER; note = 2'O-methyl-nucleotide phosphorothioate
  modified_base 20: mod_base = OTHER; note = 2'O-methyl-nucleotide phosphorothioate
  modified_base 21: mod_base = OTHER; note = 2'O-methyl-nucleotide
  misc_feature 1..13: note = RNA
  misc_feature 14: note = DNA
  misc_feature 15..21: note = RNA
ttcaactggtttgtagactat

SEQ ID NO: 103 - RNA, 23 nt, synthetic construct
  source 1..23: mol_type = other RNA
  modified_base 1: mod_base = OTHER; note = Inverted abasic nucleotide phosphorothioate
  modified_base 2: mod_base = OTHER; note = 2'O-methyl-nucleotide phosphorothioate
  modified_base 3: mod_base = OTHER; note = 2'O-methyl-nucleotide
  modified_base 4: mod_base = OTHER; note = 2'O-methyl-nucleotide
  modified_base 5: mod_base = OTHER; note = 2'O-methyl-nucleotide
  modified_base 6: mod_base = OTHER; note = 2'O-methyl-nucleotide
  modified_base 7: mod_base = OTHER; note = 2'O-methyl-nucleotide
  modified_base 8: mod_base = OTHER; note = 2'O-methyl-nucleotide
  modified_base 9: mod_base = OTHER; note = 2'O-methyl-nucleotide
  modified_base 10: mod_base = OTHER; note = 2'fluoro-nucleotide
  modified_base 11: mod_base = OTHER; note = 2'fluoro-nucleotide
  modified_base 12: mod_base = OTHER; note = 2'fluoro-nucleotide
  modified_base 13: mod_base = OTHER; note = 2'O-methyl-nucleotide
  modified_base 14: mod_base = OTHER; note = 2'O-methyl-nucleotide
  modified_base 15: mod_base = OTHER; note = 2'O-methyl-nucleotide
  modified_base 16: mod_base = OTHER; note = 2'O-methyl-nucleotide
  modified_base 17: mod_base = OTHER; note = 2'O-methyl-nucleotide
  modified_base 18: mod_base = OTHER; note = 2'O-methyl-nucleotide
  modified_base 19: mod_base = OTHER; note = 2'O-methyl-nucleotide
  modified_base 20: mod_base = OTHER; note = 2'O-methyl-nucleotide
  modified_base 21: mod_base = OTHER; note = 2'O-methyl-nucleotide
  modified_base 22: mod_base = OTHER; note = 2'O-methyl-nucleotide phosphorothioate
  modified_base 23: mod_base = OTHER; note = Inverted abasic Cholesterol-triethylene glycol nucleotide phosphorothioate
natagtctacaaaccagttgaan

SEQ ID NO: 104 - DNA, 21 bp, synthetic construct
  source 1..21: mol_type = other DNA
  modified_base 1: mod_base = OTHER; note = Vinyl phosphonate 2'O-methyl-nucleotide phosphorothioate
  modified_base 2: mod_base = OTHER; note = 2'fluoro-nucleotide phosphorothioate
  modified_base 3: mod_base = OTHER; note = 2'O-methyl-nucleotide
  modified_base 4: mod_base = OTHER; note = 2'O-methyl-nucleotide
  modified_base 5: mod_base = OTHER; note = 2'O-methyl-nucleotide
  modified_base 6: mod_base = OTHER; note = 2'fluoro-nucleotide
  modified_base 7: mod_base = OTHER; note = 2'O-methyl-nucleotide
  modified_base 8: mod_base = OTHER; note = 2'fluoro-nucleotide
  modified_base 9: mod_base = OTHER; note = 2'fluoro-nucleotide
  modified_base 10: mod_base = OTHER; note = 2'O-methyl-nucleotide
  modified_base 11: mod_base = OTHER; note = 2'O-methyl-nucleotide
  modified_base 12: mod_base = OTHER; note = 2'O-methyl-nucleotide
  modified_base 13: mod_base = OTHER; note = 2'O-methyl-nucleotide
  modified_base 14: mod_base = OTHER; note = 2'fluoro-nucleotide
  modified_base 16: mod_base = OTHER; note = 2'fluoro-nucleotide
  modified_base 17: mod_base = OTHER; note = 2'O-methyl-nucleotide
  modified_base 18: mod_base = OTHER; note = 2'O-methyl-nucleotide
  modified_base 19: mod_base = OTHER; note = 2'O-methyl-nucleotide phosphorothioate
  modified_base 20: mod_base = OTHER; note = 2'O-methyl-nucleotide phosphorothioate
  modified_base 21: mod_base = OTHER; note = 2'O-methyl-nucleotide
  misc_feature 1..14: note = RNA
  misc_feature 15: note = DNA
  misc_feature 16..21: note = RNA
ttcaactggtttgtagactat

SEQ ID NO: 105 - RNA, 23 nt, synthetic construct
  source 1..23: mol_type = other RNA
  modified_base 1: mod_base = OTHER; note = Inverted abasic nucleotide phosphorothioate
  modified_base 2: mod_base = OTHER; note = 2'O-methyl-nucleotide phosphorothioate
  modified_base 3: mod_base = OTHER; note = 2'O-methyl-nucleotide
  modified_base 4: mod_base = OTHER; note = 2'O-methyl-nucleotide
  modified_base 5: mod_base = OTHER; note = 2'O-methyl-nucleotide
  modified_base 6: mod_base = OTHER; note = 2'O-methyl-nucleotide
  modified_base 7: mod_base = OTHER; note = 2'O-methyl-nucleotide
  modified_base 8: mod_base = OTHER; note = 2'O-methyl-nucleotide
  modified_base 9: mod_base = OTHER; note = 2'O-methyl-nucleotide
  modified_base 10: mod_base = OTHER; note = 2'fluoro-nucleotide
  modified_base 11: mod_base = OTHER; note = 2'fluoro-nucleotide
  modified_base 12: mod_base = OTHER; note = 2'fluoro-nucleotide
  modified_base 13: mod_base = OTHER; note = 2'O-methyl-nucleotide
  modified_base 14: mod_base = OTHER; note = 2'O-methyl-nucleotide
  modified_base 15: mod_base = OTHER; note = 2'O-methyl-nucleotide
  modified_base 16: mod_base = OTHER; note = 2'O-methyl-nucleotide
  modified_base 17: mod_base = OTHER; note = 2'O-methyl-nucleotide
  modified_base 18: mod_base = OTHER; note = 2'O-methyl-nucleotide
  modified_base 19: mod_base = OTHER; note = 2'O-methyl-nucleotide
  modified_base 20: mod_base = OTHER; note = 2'O-methyl-nucleotide
  modified_base 21: mod_base = OTHER; note = 2'O-methyl-nucleotide
  modified_base 22: mod_base = OTHER; note = 2'O-methyl-nucleotide phosphorothioate
  modified_base 23: mod_base = OTHER; note = Inverted abasic Cholesterol-triethylene glycol nucleotide phosphorothioate
natagtctacaaaccagttgaan

SEQ ID NO: 106 - DNA, 21 bp, synthetic construct
  source 1..21: mol_type = other DNA
  modified_base 1: mod_base = OTHER; note = Vinyl phosphonate 2'O-methyl-nucleotide phosphorothioate
  modified_base 2: mod_base = OTHER; note = 2'fluoro-nucleotide phosphorothioate
  modified_base 3: mod_base = OTHER; note = 2'O-methyl-nucleotide
  modified_base 4: mod_base = OTHER; note = 2'O-methyl-nucleotide
  modified_base 5: mod_base = OTHER; note = 2'O-methyl-nucleotide
  modified_base 6: mod_base = OTHER; note = 2'fluoro-nucleotide
  modified_base 7: mod_base = OTHER; note = 2'O-methyl-nucleotide
  modified_base 8: mod_base = OTHER; note = 2'fluoro-nucleotide
  modified_base 9: mod_base = OTHER; note = 2'fluoro-nucleotide
  modified_base 10: mod_base = OTHER; note = 2'O-methyl-nucleotide
  modified_base 11: mod_base = OTHER; note = 2'O-methyl-nucleotide
  modified_base 12: mod_base = OTHER; note = 2'O-methyl-nucleotide
  modified_base 13: mod_base = OTHER; note = 2'O-methyl-nucleotide
  modified_base 14: mod_base = OTHER; note = 2'fluoro-nucleotide
  modified_base 15: mod_base = OTHER; note = 2'O-methyl-nucleotide
  modified_base 17: mod_base = OTHER; note = 2'O-methyl-nucleotide
  modified_base 18: mod_base = OTHER; note = 2'O-methyl-nucleotide
  modified_base 19: mod_base = OTHER; note = 2'O-methyl-nucleotide phosphorothioate
  modified_base 20: mod_base = OTHER; note = 2'O-methyl-nucleotide phosphorothioate
  modified_base 21: mod_base = OTHER; note = 2'O-methyl-nucleotide
  misc_feature 1..15: note = RNA
  misc_feature 16: note = DNA
  misc_feature 17..21: note = RNA
ttcaactggtttgtagactat

SEQ ID NO: 107 - RNA, 20 nt, synthetic construct
  source 1..20: mol_type = other RNA
  modified_base 1: mod_base = OTHER; note = Inverted abasic nucleotide phosphorothioate
  modified_base 2: mod_base = OTHER; note = 2'O-methyl-nucleotide phosphorothioate
  modified_base 3: mod_base = OTHER; note = 2'O-methyl-nucleotide
  modified_base 4: mod_base = OTHER; note = 2'O-methyl-nucleotide
  modified_base 5: mod_base = OTHER; note = 2'O-methyl-nucleotide
  modified_base 6: mod_base = OTHER; note = 2'O-methyl-nucleotide
  modified_base 7: mod_base = OTHER; note = 2'O-methyl-nucleotide
  modified_base 8: mod_base = OTHER; note = 2'fluoro-nucleotide
  modified_base 9: mod_base = OTHER; note = 2'fluoro-nucleotide
  modified_base 10: mod_base = OTHER; note = 2'fluoro-nucleotide
  modified_base 11: mod_base = OTHER; note = 2'O-methyl-nucleotide
  modified_base 12: mod_base = OTHER; note = 2'O-methyl-nucleotide
  modified_base 13: mod_base = OTHER; note = 2'fluoro-nucleotide
  modified_base 14: mod_base = OTHER; note = 2'O-methyl-nucleotide
  modified_base 15: mod_base = OTHER; note = 2'O-methyl-nucleotide
  modified_base 16: mod_base = OTHER; note = 2'O-methyl-nucleotide
  modified_base 17: mod_base = OTHER; note = 2'O-methyl-nucleotide
  modified_base 18: mod_base = OTHER; note = 2'fluoro-nucleotide
  modified_base 19: mod_base = OTHER; note = 2'O-methyl-nucleotide phosphorothioate
  modified_base 20: mod_base = OTHER; note = 2'O-methyl-Cholesterol-triethylene glycol nucleotide phosphorothioate
nagtctacaaaccagttgaa

SEQ ID NO: 108 - RNA, 21 nt, synthetic construct
  source 1..21: mol_type = other RNA
  modified_base 1: mod_base = OTHER; note = Vinyl phosphonate 2'O-methyl-nucleotide phosphorothioate
  modified_base 2: mod_base = OTHER; note = 2'fluoro-nucleotide phosphorothioate
  modified_base 3: mod_base = OTHER; note = 2'O-methyl-nucleotide
  modified_base 4: mod_base = OTHER; note = 2'O-methyl-nucleotide
  modified_base 5: mod_base = OTHER; note = 2'O-methyl-nucleotide
  modified_base 6: mod_base = OTHER; note = 2'fluoro-nucleotide
  modified_base 7: mod_base = OTHER; note = Unlocked nucleotide
  modified_base 8: mod_base = OTHER; note = 2'O-methyl-nucleotide
  modified_base 9: mod_base = OTHER; note = 2'O-methyl-nucleotide
  modified_base 10: mod_base = OTHER; note = 2'O-methyl-nucleotide
  modified_base 11: mod_base = OTHER; note = 2'O-methyl-nucleotide
  modified_base 12: mod_base = OTHER; note = 2'O-methyl-nucleotide
  modified_base 13: mod_base = OTHER; note = 2'O-methyl-nucleotide
  modified_base 14: mod_base = OTHER; note = 2'fluoro-nucleotide
  modified_base 15: mod_base = OTHER; note = 2'O-methyl-nucleotide
  modified_base 16: mod_base = OTHER; note = 2'fluoro-nucleotide
  modified_base 17: mod_base = OTHER; note = 2'O-methyl-nucleotide
  modified_base 18: mod_base = OTHER; note = 2'O-methyl-nucleotide
  modified_base 19: mod_base = OTHER; note = 2'O-methyl-nucleotide phosphorothioate
  modified_base 20: mod_base = OTHER; note = 2'O-methyl-nucleotide phosphorothioate
  modified_base 21: mod_base = OTHER; note = 2'O-methyl-nucleotide
ttcaactggtttgtagactat

SEQ ID NO: 109 - RNA, 20 nt, synthetic construct
  source 1..20: mol_type = other RNA
  modified_base 1: mod_base = OTHER; note = Inverted abasic nucleotide phosphorothioate
  modified_base 2: mod_base = OTHER; note = 2'O-methyl-nucleotide phosphorothioate
  modified_base 3: mod_base = OTHER; note = 2'O-methyl-nucleotide
  modified_base 4: mod_base = OTHER; note = 2'fluoro-nucleotide
  modified_base 5: mod_base = OTHER; note = 2'O-methyl-nucleotide
  modified_base 6: mod_base = OTHER; note = 2'O-methyl-nucleotide
  modified_base 7: mod_base = OTHER; note = 2'O-methyl-nucleotide
  modified_base 8: mod_base = OTHER; note = 2'fluoro-nucleotide
  modified_base 9: mod_base = OTHER; note = 2'fluoro-nucleotide
  modified_base 10: mod_base = OTHER; note = 2'fluoro-nucleotide
  modified_base 11: mod_base = OTHER; note = 2'O-methyl-nucleotide
  modified_base 12: mod_base = OTHER; note = 2'O-methyl-nucleotide
  modified_base 13: mod_base = OTHER; note = 2'fluoro-nucleotide
  modified_base 14: mod_base = OTHER; note = 2'O-methyl-nucleotide
  modified_base 15: mod_base = OTHER; note = 2'O-methyl-nucleotide
  modified_base 16: mod_base = OTHER; note = 2'O-methyl-nucleotide
  modified_base 17: mod_base = OTHER; note = 2'O-methyl-nucleotide
  modified_base 18: mod_base = OTHER; note = 2'O-methyl-nucleotide
  modified_base 19: mod_base = OTHER; note = 2'O-methyl-nucleotide phosphorothioate
  modified_base 20: mod_base = OTHER; note = 2'O-methyl-Cholesterol-triethylene glycol nucleotide phosphorothioate
nagtctacaaaccagttgaa

SEQ ID NO: 110 - RNA, 21 nt, synthetic construct
  source 1..21: mol_type = other RNA
  modified_base 1: mod_base = OTHER; note = Vinyl phosphonate 2'O-methyl-nucleotide phosphorothioate
  modified_base 2: mod_base = OTHER; note = 2'fluoro-nucleotide phosphorothioate
  modified_base 3: mod_base = OTHER; note = 2'O-methyl-nucleotide
  modified_base 4: mod_base = OTHER; note = 2'O-methyl-nucleotide
  modified_base 5: mod_base = OTHER; note = 2'O-methyl-nucleotide
  modified_base 6: mod_base = OTHER; note = 2'fluoro-nucleotide
  modified_base 7: mod_base = OTHER; note = Unlocked nucleotide
  modified_base 8: mod_base = OTHER; note = 2'O-methyl-nucleotide
  modified_base 9: mod_base = OTHER; note = 2'O-methyl-nucleotide
  modified_base 10: mod_base = OTHER; note = 2'O-methyl-nucleotide
  modified_base 11: mod_base = OTHER; note = 2'O-methyl-nucleotide
  modified_base 12: mod_base = OTHER; note = 2'O-methyl-nucleotide
  modified_base 13: mod_base = OTHER; note = 2'O-methyl-nucleotide
  modified_base 14: mod_base = OTHER; note = 2'fluoro-nucleotide
  modified_base 15: mod_base = OTHER; note = 2'O-methyl-nucleotide
  modified_base 16: mod_base = OTHER; note = 2'fluoro-nucleotide
  modified_base 17: mod_base = OTHER; note = 2'O-methyl-nucleotide
  modified_base 18: mod_base = OTHER; note = 2'O-methyl-nucleotide
  modified_base 19: mod_base = OTHER; note = 2'O-methyl-nucleotide phosphorothioate
  modified_base 20: mod_base = OTHER; note = 2'O-methyl-nucleotide phosphorothioate
  modified_base 21: mod_base = OTHER; note = 2'O-methyl-nucleotide
ttcaactggtttgtagactat

SEQ ID NO: 111 - RNA, 20 nt, synthetic construct
  source 1..20: mol_type = other RNA
  modified_base 1: mod_base = OTHER; note = Inverted abasic nucleotide phosphorothioate
  modified_base 2: mod_base = OTHER; note = 2'O-methyl-nucleotide phosphorothioate
  modified_base 3: mod_base = OTHER; note = 2'O-methyl-nucleotide
  modified_base 4: mod_base = OTHER; note = 2'O-methyl-nucleotide
  modified_base 5: mod_base = OTHER; note = 2'O-methyl-nucleotide
  modified_base 6: mod_base = OTHER; note = 2'O-methyl-nucleotide
  modified_base 7: mod_base = OTHER; note = 2'O-methyl-nucleotide
  modified_base 8: mod_base = OTHER; note = 2'fluoro-nucleotide
  modified_base 9: mod_base = OTHER; note = 2'fluoro-nucleotide
  modified_base 10: mod_base = OTHER; note = 2'fluoro-nucleotide
  modified_base 11: mod_base = OTHER; note = 2'O-methyl-nucleotide
  modified_base 12: mod_base = OTHER; note = 2'O-methyl-nucleotide
  modified_base 13: mod_base = OTHER; note = 2'fluoro-nucleotide
  modified_base 14: mod_base = OTHER; note = 2'O-methyl-nucleotide
  modified_base 15: mod_base = OTHER; note = 2'O-methyl-nucleotide
  modified_base 16: mod_base = OTHER; note = 2'O-methyl-nucleotide
  modified_base 17: mod_base = OTHER; note = 2'O-methyl-nucleotide
  modified_base 18: mod_base = OTHER; note = 2'O-methyl-nucleotide
  modified_base 19: mod_base = OTHER; note = 2'O-methyl-nucleotide phosphorothioate
  modified_base 20: mod_base = OTHER; note = 2'O-methyl-Cholesterol-triethylene glycol nucleotide phosphorothioate
nagtctacaaaccagttgaa

SEQ ID NO: 112 - RNA, 21 nt, synthetic construct
  source 1..21: mol_type = other RNA
  modified_base 1: mod_base = OTHER; note = Vinyl phosphonate 2'O-methyl-nucleotide phosphorothioate
  modified_base 2: mod_base = OTHER; note = 2'fluoro-nucleotide phosphorothioate
  modified_base 3: mod_base = OTHER; note = 2'O-methyl-nucleotide
  modified_base 4: mod_base = OTHER; note = 2'O-methyl-nucleotide
  modified_base 5: mod_base = OTHER; note = 2'O-methyl-nucleotide
  modified_base 6: mod_base = OTHER; note = 2'fluoro-nucleotide
  modified_base 7: mod_base = OTHER; note = Unlocked nucleotide
  modified_base 8: mod_base = OTHER; note = 2'O-methyl-nucleotide
  modified_base 9: mod_base = OTHER; note = 2'O-methyl-nucleotide
  modified_base 10: mod_base = OTHER; note = 2'O-methyl-nucleotide
  modified_base 11: mod_base = OTHER; note = 2'O-methyl-nucleotide
  modified_base 12: mod_base = OTHER; note = 2'O-methyl-nucleotide
  modified_base 13: mod_base = OTHER; note = 2'O-methyl-nucleotide
  modified_base 14: mod_base = OTHER; note = 2'fluoro-nucleotide
  modified_base 15: mod_base = OTHER; note = 2'O-methyl-nucleotide
  modified_base 16: mod_base = OTHER; note = 2'fluoro-nucleotide
  modified_base 17: mod_base = OTHER; note = 2'O-methyl-nucleotide
  modified_base 18: mod_base = OTHER; note = 2'O-methyl-nucleotide
  modified_base 19: mod_base = OTHER; note = 2'O-methyl-nucleotide phosphorothioate
  modified_base 20: mod_base = OTHER; note = 2'O-methyl-nucleotide phosphorothioate
  modified_base 21: mod_base = OTHER; note = 2'O-methyl-nucleotide
ttcaactggtttgtagactat

SEQ ID NO: 113 - RNA, 21 nt, synthetic construct
  source 1..21: mol_type = other RNA
  modified_base 1: mod_base = OTHER; note = 2'O-methyl-nucleotide phosphorothioate
  modified_base 2: mod_base = OTHER; note = 2'O-methyl-nucleotide phosphorothioate
  modified_base 3: mod_base = OTHER; note = 2'fluoro-nucleotide
  modified_base 4: mod_base = OTHER; note = 2'O-methyl-nucleotide
  modified_base 5: mod_base = OTHER; note = 2'fluoro-nucleotide
  modified_base 6: mod_base = OTHER; note = 2'O-methyl-nucleotide
  modified_base 7: mod_base = OTHER; note = 2'fluoro-nucleotide
  modified_base 8: mod_base = OTHER; note = 2'O-methyl-nucleotide
  modified_base 9: mod_base = OTHER; note = 2'fluoro-nucleotide
  modified_base 10: mod_base = OTHER; note = 2'O-methyl-nucleotide
  modified_base 11: mod_base = OTHER; note = 2'fluoro-nucleotide
  modified_base 12: mod_base = OTHER; note = 2'O-methyl-nucleotide
  modified_base 13: mod_base = OTHER; note = 2'fluoro-nucleotide
  modified_base 14: mod_base = OTHER; note = 2'O-methyl-nucleotide
  modified_base 15: mod_base = OTHER; note = 2'fluoro-nucleotide
  modified_base 16: mod_base = OTHER; note = 2'O-methyl-nucleotide
  modified_base 17: mod_base = OTHER; note = 2'fluoro-nucleotide
  modified_base 18: mod_base = OTHER; note = 2'O-methyl-nucleotide
  modified_base 19: mod_base = OTHER; note = 2'fluoro-nucleotide phosphorothioate
  modified_base 20: mod_base = OTHER; note = 2'O-methyl-nucleotide phosphorothioate
  modified_base 21: mod_base = OTHER; note = 2'O-methyl-Cholesterol-triethylene glycol nucleotide
aagtgtggctcattaggcatt

SEQ ID NO: 114 - RNA, 21 nt, synthetic construct
  source 1..21: mol_type = other RNA
  modified_base 1: mod_base = OTHER; note = Vinyl phosphonate 2'O-methyl-nucleotide phosphorothioate
  modified_base 2: mod_base = OTHER; note = 2'fluoro-nucleotide phosphorothioate
  modified_base 3: mod_base = OTHER; note = 2'O-methyl-nucleotide
  modified_base 4: mod_base = OTHER; note = 2'fluoro-nucleotide
  modified_base 5: mod_base = OTHER; note = 2'O-methyl-nucleotide
  modified_base 6: mod_base = OTHER; note = 2'fluoro-nucleotide
  modified_base 7: mod_base = OTHER; note = 2'O-methyl-nucleotide
  modified_base 8: mod_base = OTHER; note = 2'fluoro-nucleotide
  modified_base 9: mod_base = OTHER; note = 2'O-methyl-nucleotide
  modified_base 10: mod_base = OTHER; note = 2'fluoro-nucleotide
  modified_base 11: mod_base = OTHER; note = 2'O-methyl-nucleotide
  modified_base 12: mod_base = OTHER; note = 2'fluoro-nucleotide
  modified_base 13: mod_base = OTHER; note = 2'O-methyl-nucleotide
  modified_base 14: mod_base = OTHER; note = 2'fluoro-nucleotide
  modified_base 15: mod_base = OTHER; note = 2'O-methyl-nucleotide
  modified_base 16: mod_base = OTHER; note = 2'fluoro-nucleotide
  modified_base 17: mod_base = OTHER; note = 2'O-methyl-nucleotide
  modified_base 18: mod_base = OTHER; note = 2'fluoro-nucleotide
  modified_base 19: mod_base = OTHER; note = 2'O-methyl-nucleotide phosphorothioate
  modified_base 20: mod_base = OTHER; note = 2'O-methyl-nucleotide phosphorothioate
  modified_base 21: mod_base = OTHER; note = 2'O-methyl-nucleotide
tgcctaatgagccacactttt

SEQ ID NO: 115 - RNA, 19 nt, synthetic construct
  source 1..19: mol_type = other RNA
  modified_base 1: mod_base = OTHER; note = 2'O-methyl-nucleotide phosphorothioate
  modified_base 2: mod_base = OTHER; note = 2'O-methyl-nucleotide phosphorothioate
  modified_base 3: mod_base = OTHER; note = 2'fluoro-nucleotide
  modified_base 4: mod_base = OTHER; note = 2'O-methyl-nucleotide
  modified_base 5: mod_base = OTHER; note = 2'O-methyl-nucleotide
  modified_base 6: mod_base = OTHER; note = 2'O-methyl-nucleotide
  modified_base 7: mod_base = OTHER; note = 2'fluoro-nucleotide
  modified_base 8: mod_base = OTHER; note = 2'fluoro-nucleotide
  modified_base 9: mod_base = OTHER; note = 2'fluoro-nucleotide
  modified_base 10: mod_base = OTHER; note = 2'O-methyl-nucleotide
  modified_base 11: mod_base = OTHER; note = 2'O-methyl-nucleotide
  modified_base 12: mod_base = OTHER; note = 2'fluoro-nucleotide
  modified_base 13: mod_base = OTHER; note = 2'O-methyl-nucleotide
  modified_base 14: mod_base = OTHER; note = 2'O-methyl-nucleotide
  modified_base 15: mod_base = OTHER; note = 2'O-methyl-nucleotide
  modified_base 16: mod_base = OTHER; note = 2'O-methyl-nucleotide
  modified_base 17: mod_base = OTHER; note = 2'fluoro-nucleotide
  modified_base 18: mod_base = OTHER; note = 2'O-methyl-nucleotide
  modified_base 19: mod_base = OTHER; note = 2'O-methyl-Cholesterol-triethylene glycol nucleotide
aagtgtggctcattaggca

SEQ ID NO: 116 - RNA, 21 nt, synthetic construct
  source 1..21: mol_type = other RNA
  modified_base 1: mod_base = OTHER; note = Vinyl phosphonate 2'O-methyl-nucleotide phosphorothioate
  modified_base 2: mod_base = OTHER; note = 2'fluoro-nucleotide phosphorothioate
  modified_base 3: mod_base = OTHER; note = 2'O-methyl-nucleotide
  modified_base 4: mod_base = OTHER; note = 2'O-methyl-nucleotide
  modified_base 5: mod_base = OTHER; note = 2'O-methyl-nucleotide
  modified_base 6: mod_base = OTHER; note = 2'fluoro-nucleotide
  modified_base 7: mod_base = OTHER; note = 2'O-methyl-nucleotide
  modified_base 8: mod_base = OTHER; note = 2'O-methyl-nucleotide
  modified_base 9: mod_base = OTHER; note = 2'O-methyl-nucleotide
  modified_base 10: mod_base = OTHER; note = 2'O-methyl-nucleotide
  modified_base 11: mod_base = OTHER; note = 2'O-methyl-nucleotide
  modified_base 12: mod_base = OTHER; note = 2'O-methyl-nucleotide
  modified_base 13: mod_base = OTHER; note = 2'O-methyl-nucleotide
  modified_base 14: mod_base = OTHER; note = 2'fluoro-nucleotide
  modified_base 15: mod_base = OTHER; note = 2'O-methyl-nucleotide
  modified_base 16: mod_base = OTHER; note = 2'fluoro-nucleotide
  modified_base 17: mod_base = OTHER; note = 2'O-methyl-nucleotide
  modified_base 18: mod_base = OTHER; note = 2'O-methyl-nucleotide
  modified_base 19: mod_base = OTHER; note = 2'O-methyl-nucleotide phosphorothioate
  modified_base 20: mod_base = OTHER; note = 2'O-methyl-nucleotide phosphorothioate
  modified_base 21: mod_base = OTHER; note = 2'O-methyl-nucleotide
tgcctaatgagccacacttgg

SEQ ID NO: 117 - RNA, 19 nt, synthetic construct
  source 1..19: mol_type = other RNA
  modified_base 1: mod_base = OTHER; note = 2'O-methyl-nucleotide phosphorothioate
  modified_base 2: mod_base = OTHER; note = 2'O-methyl-nucleotide phosphorothioate
  modified_base 3: mod_base = OTHER; note = 2'fluoro-nucleotide
  modified_base 4: mod_base = OTHER; note = 2'O-methyl-nucleotide
  modified_base 5: mod_base = OTHER; note = 2'O-methyl-nucleotide
  modified_base 6: mod_base = OTHER; note = 2'O-methyl-nucleotide
  modified_base 7: mod_base = OTHER; note = 2'fluoro-nucleotide
  modified_base 8: mod_base = OTHER; note = 2'fluoro-nucleotide
  modified_base 9: mod_base = OTHER; note = 2'fluoro-nucleotide
  modified_base 10: mod_base = OTHER; note = 2'O-methyl-nucleotide
  modified_base 11: mod_base = OTHER; note = 2'O-methyl-nucleotide
  modified_base 12: mod_base = OTHER; note = 2'fluoro-nucleotide
  modified_base 13: mod_base = OTHER; note = 2'O-methyl-nucleotide
  modified_base 14: mod_base = OTHER; note = 2'O-methyl-nucleotide
  modified_base 15: mod_base = OTHER; note = 2'O-methyl-nucleotide
  modified_base 16: mod_base = OTHER; note = 2'O-methyl-nucleotide
  modified_base 17: mod_base = OTHER; note = 2'fluoro-nucleotide
  modified_base 18: mod_base = OTHER; note = 2'O-methyl-nucleotide
  modified_base 19: mod_base = OTHER; note = 2'O-methyl-Cholesterol-triethylene glycol nucleotide
aagtgtggctcattaggca

SEQ ID NO: 118 - RNA, 21 nt, synthetic construct
  source 1..21: mol_type = other RNA
  modified_base 1: mod_base = OTHER; note = Vinyl phosphonate 2'O-methyl-nucleotide phosphorothioate
  modified_base 2: mod_base = OTHER; note = 2'fluoro-nucleotide phosphorothioate
  modified_base 3: mod_base = OTHER; note = 2'O-methyl-nucleotide
  modified_base 4: mod_base = OTHER; note = 2'O-methyl-nucleotide
  modified_base 5: mod_base = OTHER; note = 2'O-methyl-nucleotide
  modified_base 6: mod_base = OTHER; note = 2'fluoro-nucleotide
  modified_base 7: mod_base = OTHER; note = Glycol nucleotide
  modified_base 8: mod_base = OTHER; note = 2'O-methyl-nucleotide
  modified_base 9: mod_base = OTHER; note = 2'O-methyl-nucleotide
  modified_base 10: mod_base = OTHER; note = 2'O-methyl-nucleotide
  modified_base 11: mod_base = OTHER; note = 2'O-methyl-nucleotide
  modified_base 12: mod_base = OTHER; note = 2'O-methyl-nucleotide
  modified_base 13: mod_base = OTHER; note = 2'O-methyl-nucleotide
  modified_base 14: mod_base = OTHER; note = 2'fluoro-nucleotide
  modified_base 15: mod_base = OTHER; note = 2'O-methyl-nucleotide
  modified_base 16: mod_base = OTHER; note = 2'fluoro-nucleotide
  modified_base 17: mod_base = OTHER; note = 2'O-methyl-nucleotide
  modified_base 18: mod_base = OTHER; note = 2'O-methyl-nucleotide
  modified_base 19: mod_base = OTHER; note = 2'O-methyl-nucleotide phosphorothioate
  modified_base 20: mod_base = OTHER; note = 2'O-methyl-nucleotide phosphorothioate
  modified_base 21: mod_base = OTHER; note = 2'O-methyl-nucleotide
tgcctaatgagccacacttgg

SEQ ID NO: 119 - RNA, 21 nt, synthetic construct
  source 1..21: mol_type = other RNA
  modified_base 1: mod_base = OTHER; note = Inverted abasic nucleotide phosphorothioate
  modified_base 2: mod_base = OTHER; note = 2'O-methyl-nucleotide phosphorothioate
  modified_base 3: mod_base = OTHER; note = 2'O-methyl-nucleotide
  modified_base 4: mod_base = OTHER; note = 2'O-methyl-nucleotide
  modified_base 5: mod_base = OTHER; note = 2'O-methyl-nucleotide
  modified_base 6: mod_base = OTHER; note = 2'O-methyl-nucleotide
  modified_base 7: mod_base = OTHER; note = 2'O-methyl-nucleotide
  modified_base 8: mod_base = OTHER; note = 2'fluoro-nucleotide
  modified_base 9: mod_base = OTHER; note = 2'fluoro-nucleotide
  modified_base 10: mod_base = OTHER; note = 2'fluoro-nucleotide
  modified_base 11: mod_base = OTHER; note = 2'O-methyl-nucleotide
  modified_base 12: mod_base = OTHER; note = 2'O-methyl-nucleotide
  modified_base 13: mod_base = OTHER; note = 2'O-methyl-nucleotide
  modified_base 14: mod_base = OTHER; note = 2'O-methyl-nucleotide
  modified_base 15: mod_base = OTHER; note = 2'O-methyl-nucleotide
  modified_base 16: mod_base = OTHER; note = 2'O-methyl-nucleotide
  modified_base 17: mod_base = OTHER; note = 2'O-methyl-nucleotide
  modified_base 18: mod_base = OTHER; note = 2'O-methyl-nucleotide
  modified_base 19: mod_base = OTHER; note = 2'O-methyl-nucleotide phosphorothioate
  modified_base 20: mod_base = OTHER; note = 2'O-methyl-nucleotide phosphorothioate
  modified_base 21: mod_base = OTHER; note = Inverted abasic Cholesterol-triethylene glycol nucleotide
naagtgtggctcattaggcan

SEQ ID NO: 120 - RNA, 21 nt, synthetic construct
  source 1..21: mol_type = other RNA
  modified_base 1: mod_base = OTHER; note = Vinyl phosphonate 2'O-methyl-nucleotide phosphorothioate
  modified_base 2: mod_base = OTHER; note = 2'fluoro-nucleotide phosphorothioate
  modified_base 3: mod_base = OTHER; note = 2'O-methyl-nucleotide phosphorothioate
  modified_base 4: mod_base = OTHER; note = 2'fluoro-nucleotide
  modified_base 5: mod_base = OTHER; note = 2'O-methyl-nucleotide
  modified_base 6: mod_base = OTHER; note = 2'fluoro-nucleotide
  modified_base 7: mod_base = OTHER; note = 2'O-methyl-nucleotide
  modified_base 8: mod_base = OTHER; note = 2'fluoro-nucleotide
  modified_base 9: mod_base = OTHER; note = 2'O-methyl-nucleotide
  modified_base 10: mod_base = OTHER; note = 2'fluoro-nucleotide
  modified_base 11: mod_base = OTHER; note = 2'O-methyl-nucleotide
  modified_base 12: mod_base = OTHER; note = 2'fluoro-nucleotide
  modified_base 13: mod_base = OTHER; note = 2'O-methyl-nucleotide
  modified_base 14: mod_base = OTHER; note = 2'fluoro-nucleotide
  modified_base 15: mod_base = OTHER; note = 2'O-methyl-nucleotide
  modified_base 16: mod_base = OTHER; note = 2'fluoro-nucleotide
  modified_base 17: mod_base = OTHER; note = 2'O-methyl-nucleotide
  modified_base 18: mod_base = OTHER; note = 2'fluoro-nucleotide
  modified_base 19: mod_base = OTHER; note = 2'O-methyl-nucleotide
  modified_base 20: mod_base = OTHER; note = 2'O-methyl-nucleotide phosphorothioate
  modified_base 21: mod_base = OTHER; note = 2'O-methyl-nucleotide
tgcctaatgagccacacttgg

SEQ ID NO: 121 - RNA, 19 nt, synthetic construct
  source 1..19: mol_type = other RNA
  modified_base 1: mod_base = OTHER; note = 2'O-methyl-nucleotide phosphorothioate
  modified_base 2: mod_base = OTHER; note = 2'O-methyl-nucleotide phosphorothioate
  modified_base 3: mod_base = OTHER; note = 2'O-methyl-nucleotide
  modified_base 4: mod_base = OTHER; note = 2'O-methyl-nucleotide
  modified_base 5: mod_base = OTHER; note = 2'fluoro-nucleotide
  modified_base 6: mod_base = OTHER; note = 2'O-methyl-nucleotide
  modified_base 7: mod_base = OTHER; note = 2'fluoro-nucleotide
  modified_base 8: mod_base = OTHER; note = 2'fluoro-nucleotide
  modified_base 9: mod_base = OTHER; note = 2'fluoro-nucleotide
  modified_base 10: mod_base = OTHER; note = 2'O-methyl-nucleotide
  modified_base 11: mod_base = OTHER; note = 2'O-methyl-nucleotide
  modified_base 12: mod_base = OTHER; note = 2'O-methyl-nucleotide
  modified_base 13: mod_base = OTHER; note = 2'O-methyl-nucleotide
  modified_base 14: mod_base = OTHER; note = 2'O-methyl-nucleotide
  modified_base 15: mod_base = OTHER; note = 2'O-methyl-nucleotide
  modified_base 16: mod_base = OTHER; note = 2'O-methyl-nucleotide
  modified_base 17: mod_base = OTHER; note = 2'O-methyl-nucleotide phosphorothioate
  modified_base 18: mod_base = OTHER; note = 2'O-methyl-nucleotide phosphorothioate
  modified_base 19: mod_base = OTHER; note = 2'O-methyl-Cholesterol-triethylene glycol nucleotide
aagtgtggctcattaggca

SEQ ID NO: 122 - RNA, 21 nt, synthetic construct
  source 1..21: mol_type = other RNA
  modified_base 1: mod_base = OTHER; note = Vinyl phosphonate 2'O-methyl-nucleotide phosphorothioate
  modified_base 2: mod_base = OTHER; note = 2'fluoro-nucleotide phosphorothioate
  modified_base 3: mod_base = OTHER; note = 2'O-methyl-nucleotide
  modified_base 4: mod_base = OTHER; note = 2'O-methyl-nucleotide
  modified_base 5: mod_base = OTHER; note = 2'O-methyl-nucleotide
  modified_base 6: mod_base = OTHER; note = 2'fluoro-nucleotide
  modified_base 7: mod_base = OTHER; note = 2'O-methyl-nucleotide
  modified_base 8: mod_base = OTHER; note = 2'fluoro-nucleotide
  modified_base 9: mod_base = OTHER; note = 2'fluoro-nucleotide
  modified_base 10: mod_base = OTHER; note = 2'O-methyl-nucleotide
  modified_base 11: mod_base = OTHER; note = 2'O-methyl-nucleotide
  modified_base 12: mod_base = OTHER; note = 2'O-methyl-nucleotide
  modified_base 13: mod_base = OTHER; note = 2'O-methyl-nucleotide
  modified_base 14: mod_base = OTHER; note = 2'fluoro-nucleotide
  modified_base 15: mod_base = OTHER; note = 2'O-methyl-nucleotide
  modified_base 16: mod_base = OTHER; note = 2'fluoro-nucleotide
  modified_base 17: mod_base = OTHER; note = 2'O-methyl-nucleotide
  modified_base 18: mod_base = OTHER; note = 2'O-methyl-nucleotide
  modified_base 19: mod_base = OTHER; note = 2'O-methyl-nucleotide phosphorothioate
  modified_base 20: mod_base = OTHER; note = 2'O-methyl-nucleotide phosphorothioate
  modified_base 21: mod_base = OTHER; note = 2'O-methyl-nucleotide
tgcctaatgagccacacttgg

SEQ ID NO: 123 - RNA, 21 nt, synthetic construct
  source 1..21: mol_type = other RNA
  modified_base 1: mod_base = OTHER; note = 2'O-methyl-nucleotide phosphorothioate
  modified_base 2: mod_base = OTHER; note = 2'O-methyl-nucleotide phosphorothioate
  modified_base 3: mod_base = OTHER; note = 2'O-methyl-nucleotide
  modified_base 4: mod_base = OTHER; note = 2'O-methyl-nucleotide
  modified_base 5: mod_base = OTHER; note = 2'O-methyl-nucleotide
  modified_base 6: mod_base = OTHER; note = 2'O-methyl-nucleotide
  modified_base 7: mod_base = OTHER; note = 2'fluoro-nucleotide
  modified_base 8: mod_base = OTHER; note = 2'O-methyl-nucleotide
  modified_base 9: mod_base = OTHER; note = 2'fluoro-nucleotide
  modified_base 10: mod_base = OTHER; note = 2'fluoro-nucleotide
  modified_base 11: mod_base = OTHER; note = 2'fluoro-nucleotide
  modified_base 12: mod_base = OTHER; note = 2'O-methyl-nucleotide
  modified_base 13: mod_base = OTHER; note = 2'O-methyl-nucleotide
  modified_base 14: mod_base = OTHER; note = 2'O-methyl-nucleotide
  modified_base 15: mod_base = OTHER; note = 2'O-methyl-nucleotide
  modified_base 16: mod_base = OTHER; note = 2'O-methyl-nucleotide
  modified_base 17: mod_base = OTHER; note = 2'O-methyl-nucleotide
  modified_base 18: mod_base = OTHER; note = 2'O-methyl-nucleotide
  modified_base 19: mod_base = OTHER; note = 2'O-methyl-nucleotide phosphorothioate
  modified_base 20: mod_base = OTHER; note = 2'O-methyl-nucleotide phosphorothioate
  modified_base 21: mod_base = OTHER; note = 2'O-methyl-Cholesterol-triethylene glycol nucleotide
ccaagtgtggctcattaggca

SEQ ID NO: 124 - RNA, 23 nt, synthetic construct
  source 1..23: mol_type = other RNA
  modified_base 1: mod_base = OTHER; note = Vinyl phosphonate 2'O-methyl-nucleotide phosphorothioate
  modified_base 2: mod_base = OTHER; note = 2'fluoro-nucleotide phosphorothioate
  modified_base 3: mod_base = OTHER; note = 2'O-methyl-nucleotide
  modified_base 4: mod_base = OTHER; note = 2'O-methyl-nucleotide
  modified_base 5: mod_base = OTHER; note = 2'O-methyl-nucleotide
  modified_base 6: mod_base = OTHER; note = 2'fluoro-nucleotide
  modified_base 7: mod_base = OTHER; note = 2'O-methyl-nucleotide
  modified_base 8: mod_base = OTHER; note = 2'fluoro-nucleotide
  modified_base 9: mod_base = OTHER; note = 2'fluoro-nucleotide
  modified_base 10: mod_base = OTHER; note = 2'O-methyl-nucleotide
  modified_base 11: mod_base = OTHER; note = 2'O-methyl-nucleotide
  modified_base 12: mod_base = OTHER; note = 2'O-methyl-nucleotide
  modified_base 13: mod_base = OTHER; note = 2'O-methyl-nucleotide
  modified_base 14: mod_base = OTHER; note = 2'fluoro-nucleotide
  modified_base 15: mod_base = OTHER; note = 2'O-methyl-nucleotide
  modified_base 16: mod_base = OTHER; note = 2'fluoro-nucleotide
  modified_base 17: mod_base = OTHER; note = 2'O-methyl-nucleotide
  modified_base 18: mod_base = OTHER; note = 2'O-methyl-nucleotide
  modified_base 19: mod_base = OTHER; note = 2'O-methyl-nucleotide
  modified_base 20: mod_base = OTHER; note = 2'O-methyl-nucleotide
  modified_base 21: mod_base = OTHER; note = 2'O-methyl-nucleotide phosphorothioate
  modified_base 22: mod_base = OTHER; note = 2'O-methyl-nucleotide phosphorothioate
  modified_base 23: mod_base = OTHER; note = 2'O-methyl-nucleotide
tgcctaatgagccacacttggag

SEQ ID NO: 125 - RNA, 21 nt, synthetic construct
  source 1..21: mol_type = other RNA
  modified_base 1: mod_base = OTHER; note = 2'O-methyl-nucleotide phosphorothioate
  modified_base 2: mod_base = OTHER; note = 2'O-methyl-nucleotide phosphorothioate
  modified_base 3: mod_base = OTHER; note = 2'O-methyl-nucleotide
  modified_base 4: mod_base = OTHER; note = 2'O-methyl-nucleotide
  modified_base 5: mod_base = OTHER; note = 2'O-methyl-nucleotide
  modified_base 6: mod_base = OTHER; note = 2'O-methyl-nucleotide
  modified_base 7: mod_base = OTHER; note = 2'O-methyl-nucleotide
  modified_base 8: mod_base = OTHER; note = 2'O-methyl-nucleotide
  modified_base 9: mod_base = OTHER; note = 2'fluoro-nucleotide
  modified_base 10: mod_base = OTHER; note = 2'O-methyl-nucleotide
  modified_base 11: mod_base = OTHER; note = 2'fluoro-nucleotide
  modified_base 12: mod_base = OTHER; note = 2'fluoro-nucleotide
  modified_base 13: mod_base = OTHER; note = 2'fluoro-nucleotide
  modified_base 14: mod_base = OTHER; note = 2'fluoro-nucleotide
  modified_base 15: mod_base = OTHER; note = 2'O-methyl-nucleotide
  modified_base 16: mod_base = OTHER; note = 2'O-methyl-nucleotide
  modified_base 17: mod_base = OTHER; note = 2'O-methyl-nucleotide
  modified_base 18: mod_base = OTHER; note = 2'O-methyl-nucleotide
  modified_base 19: mod_base = OTHER; note = 2'O-methyl-nucleotide
  modified_base 20: mod_base = OTHER; note = 2'O-methyl-nucleotide phosphorothioate
  modified_base 21: mod_base = OTHER; note = Inverted abasic Cholesterol-triethylene glycol nucleotide
caagtgtggctcattaggcan

SEQ ID NO: 126 - RNA, 23 nt, synthetic construct
  source 1..23: mol_type = other RNA
  modified_base 1: mod_base = OTHER; note = Vinyl phosphonate 2'O-methyl-nucleotide phosphorothioate
  modified_base 2: mod_base = OTHER; note = 2'fluoro-nucleotide phosphorothioate
  modified_base 3: mod_base = OTHER; note = 2'O-methyl-nucleotide
  modified_base 4: mod_base = OTHER; note = 2'O-methyl-nucleotide
  modified_base 5: mod_base = OTHER; note = 2'O-methyl-nucleotide
  modified_base 6: mod_base = OTHER; note = 2'O-methyl-nucleotide
  modified_base 7: mod_base = OTHER; note = 2'fluoro-nucleotide
  modified_base 8: mod_base = OTHER; note = 2'O-methyl-nucleotide
  modified_base 9: mod_base = OTHER; note = 2'O-methyl-nucleotide
  modified_base 10: mod_base = OTHER; note = 2'O-methyl-nucleotide
  modified_base 11: mod_base = OTHER; note = 2'O-methyl-nucleotide
  modified_base 12: mod_base = OTHER; note = 2'fluoro-nucleotide
  modified_base 13: mod_base = OTHER; note = 2'O-methyl-nucleotide
  modified_base 14: mod_base = OTHER; note = 2'fluoro-nucleotide
  modified_base 15: mod_base = OTHER; note = 2'O-methyl-nucleotide
  modified_base 16: mod_base = OTHER; note = 2'O-methyl-nucleotide
  modified_base 17: mod_base = OTHER; note = 2'O-methyl-nucleotide
  modified_base 18: mod_base = OTHER; note = 2'O-methyl-nucleotide
  modified_base 19: mod_base = OTHER; note = 2'O-methyl-nucleotide
  modified_base 20: mod_base = OTHER; note = 2'O-methyl-nucleotide
  modified_base 21: mod_base = OTHER; note = 2'O-methyl-nucleotide phosphorothioate
  modified_base 22: mod_base = OTHER; note = 2'O-methyl-nucleotide phosphorothioate
  modified_base 23: mod_base = OTHER; note = 2'O-methyl-nucleotide
tgcctaatgagccacacttggtt

SEQ ID NO: 127 - RNA, 22 nt, synthetic construct
  source 1..22: mol_type = other RNA
  modified_base 1: mod_base = OTHER; note = Inverted abasic nucleotide phosphorothioate
  modified_base 2: mod_base = OTHER; note = 2'O-methyl-nucleotide phosphorothioate
  modified_base 3: mod_base = OTHER; note = 2'O-methyl-nucleotide
  modified_base 4: mod_base = OTHER; note = 2'O-methyl-nucleotide
  modified_base 5: mod_base = OTHER; note = 2'O-methyl-nucleotide
  modified_base 6: mod_base = OTHER; note = 2'fluoro-nucleotide
  modified_base 7: mod_base = OTHER; note = 2'O-methyl-nucleotide
  modified_base 8: mod_base = OTHER; note = 2'fluoro-nucleotide
  modified_base 9: mod_base = OTHER; note = 2'fluoro-nucleotide
  modified_base 10: mod_base = OTHER; note = 2'fluoro-nucleotide
  modified_base 11: mod_base = OTHER; note = 2'O-methyl-nucleotide
  modified_base 12: mod_base = OTHER; note = 2'O-methyl-nucleotide
  modified_base 13: mod_base = OTHER; note = 2'O-methyl-nucleotide
  modified_base 14: mod_base = OTHER; note = 2'O-methyl-nucleotide
  modified_base 15: mod_base = OTHER; note = 2'O-methyl-nucleotide
  modified_base 16: mod_base = OTHER; note = 2'O-methyl-nucleotide
  modified_base 17: mod_base = OTHER; note = 2'O-methyl-nucleotide
  modified_base 18: mod_base = OTHER; note = 2'O-methyl-nucleotide
  modified_base 19: mod_base = OTHER; note = 2'O-methyl-nucleotide
  modified_base 20: mod_base = OTHER; note = 2'O-methyl-nucleotide phosphorothioate
  modified_base 21: mod_base = OTHER; note = 2'O-methyl-nucleotide phosphorothioate
  modified_base 22: mod_base = OTHER; note = 2'O-methyl-Cholesterol-triethylene glycol nucleotide
naagtgtggctcattaggcaac

SEQ ID NO: 128 - RNA, 21 nt, synthetic construct
  source 1..21: mol_type = other RNA
  modified_base 1: mod_base = OTHER; note = Vinyl phosphonate 2'O-methyl-nucleotide phosphorothioate
  modified_base 2: mod_base = OTHER; note = 2'fluoro-nucleotide phosphorothioate
  modified_base 3: mod_base = OTHER; note = 2'O-methyl-nucleotide
  modified_base 4: mod_base = OTHER; note = 2'O-methyl-nucleotide
  modified_base 5: mod_base = OTHER; note = 2'O-methyl-nucleotide
  modified_base 6: mod_base = OTHER; note = 2'fluoro-nucleotide
  modified_base 7: mod_base = OTHER; note = 2'O-methyl-nucleotide
  modified_base 8: mod_base = OTHER; note = 2'O-methyl-nucleotide
  modified_base 9: mod_base = OTHER; note = 2'O-methyl-nucleotide
  modified_base 10: mod_base = OTHER; note = 2'O-methyl-nucleotide
  modified_base 11: mod_base = OTHER; note = 2'O-methyl-nucleotide
  modified_base 12: mod_base = OTHER; note = 2'O-methyl-nucleotide
  modified_base 13: mod_base = OTHER; note = 2'O-methyl-nucleotide
  modified_base 14: mod_base = OTHER; note = 2'fluoro-nucleotide
  modified_base 15: mod_base = OTHER; note = 2'O-methyl-nucleotide
  modified_base 16: mod_base = OTHER; note = 2'fluoro-nucleotide
  modified_base 17: mod_base = OTHER; note = 2'O-methyl-nucleotide
  modified_base 18: mod_base = OTHER; note = 2'O-methyl-nucleotide
  modified_base 19: mod_base = OTHER; note = 2'O-methyl-nucleotide phosphorothioate
  modified_base 20: mod_base = OTHER; note = 2'O-methyl-nucleotide phosphorothioate
  modified_base 21: mod_base = OTHER; note = 2'O-methyl-nucleotide
tgcctaatgagccacacttgg

SEQ ID NO: 129 - RNA, 23 nt, synthetic construct
  source 1..23: mol_type = other RNA
  modified_base 1: mod_base = OTHER; note = Inverted abasic nucleotide phosphorothioate
  modified_base 2: mod_base = OTHER; note = 2'O-methyl-nucleotide phosphorothioate
  modified_base 3: mod_base = OTHER; note = 2'O-methyl-nucleotide
  modified_base 4: mod_base = OTHER; note = 2'O-methyl-nucleotide
  modified_base 5: mod_base = OTHER; note = 2'O-methyl-nucleotide
  modified_base 6: mod_base = OTHER; note = 2'O-methyl-nucleotide
  modified_base 7: mod_base = OTHER; note = 2'O-methyl-nucleotide
  modified_base 8: mod_base = OTHER; note = 2'O-methyl-nucleotide
  modified_base 9: mod_base = OTHER; note = 2'O-methyl-nucleotide
  modified_base 10: mod_base = OTHER; note = 2'fluoro-nucleotide
  modified_base 11: mod_base = OTHER; note = 2'fluoro-nucleotide
  modified_base 12: mod_base = OTHER; note = 2'fluoro-nucleotide
  modified_base 13: mod_base = OTHER; note = 2'O-methyl-nucleotide
  modified_base 14: mod_base = OTHER; note = 2'O-methyl-nucleotide
  modified_base 15: mod_base = OTHER; note = 2'O-methyl-nucleotide
  modified_base 16: mod_base = OTHER; note = 2'O-methyl-nucleotide
  modified_base 17: mod_base = OTHER; note = 2'O-methyl-nucleotide
  modified_base 18: mod_base = OTHER; note = 2'O-methyl-nucleotide
  modified_base 19: mod_base = OTHER; note = 2'O-methyl-nucleotide
  modified_base 20: mod_base = OTHER; note = 2'O-methyl-nucleotide
  modified_base 21: mod_base = OTHER; note = 2'O-methyl-nucleotide phosphorothioate
  modified_base 22: mod_base = OTHER; note = 2'O-methyl-nucleotide phosphorothioate
  modified_base 23: mod_base = OTHER; note = Inverted abasic Cholesterol-triethylene glycol nucleotide
nccaagtgtggctcattaggcan

SEQ ID NO: 130 - RNA, 21 nt, synthetic construct
  source 1..21: mol_type = other RNA
  modified_base 1: mod_base = OTHER; note = Vinyl phosphonate 2'O-methyl-nucleotide phosphorothioate
  modified_base 2: mod_base = OTHER; note = 2'fluoro-nucleotide phosphorothioate
  modified_base 3: mod_base = OTHER; note = 2'O-methyl-nucleotide phosphorothioate
  modified_base 4: mod_base = OTHER; note = 2'fluoro-nucleotide
  modified_base 5: mod_base = OTHER; note = 2'O-methyl-nucleotide
  modified_base 6: mod_base = OTHER; note = 2'fluoro-nucleotide
  modified_base 7: mod_base = OTHER; note = 2'O-methyl-nucleotide
  modified_base 8: mod_base = OTHER; note = 2'fluoro-nucleotide
  modified_base 9: mod_base = OTHER; note = 2'O-methyl-nucleotide
  modified_base 10: mod_base = OTHER; note = 2'fluoro-nucleotide
  modified_base 11: mod_base = OTHER; note = 2'O-methyl-nucleotide
  modified_base 12: mod_base = OTHER; note = 2'fluoro-nucleotide
  modified_base 13: mod_base = OTHER; note = 2'O-methyl-nucleotide
  modified_base 14: mod_base = OTHER; note = 2'fluoro-nucleotide
  modified_base 15: mod_base = OTHER; note = 2'O-methyl-nucleotide
  modified_base 16: mod_base = OTHER; note = 2'fluoro-nucleotide
  modified_base 17: mod_base = OTHER; note = 2'O-methyl-nucleotide
  modified_base 18: mod_base = OTHER; note = 2'fluoro-nucleotide
  modified_base 19: mod_base = OTHER; note = 2'O-methyl-nucleotide
  modified_base 20: mod_base = OTHER; note = 2'O-methyl-nucleotide phosphorothioate
  modified_base 21: mod_base = OTHER; note = 2'O-methyl-nucleotide
tgcctaatgagccacacttgg

SEQ ID NO: 131 - RNA, 21 nt, synthetic construct
  source 1..21: mol_type = other RNA
  modified_base 1: mod_base = OTHER; note = Inverted abasic nucleotide phosphorothioate
  modified_base 2: mod_base = OTHER; note = 2'O-methyl-nucleotide phosphorothioate
  modified_base 3: mod_base = OTHER; note = 2'O-methyl-nucleotide
  modified_base 4: mod_base = OTHER; note = 2'O-methyl-nucleotide
  modified_base 5: mod_base = OTHER; note = 2'O-methyl-nucleotide
  modified_base 6: mod_base = OTHER; note = 2'O-methyl-nucleotide
  modified_base 7: mod_base = OTHER; note = 2'O-methyl-nucleotide
  modified_base 8: mod_base = OTHER; note = 2'fluoro-nucleotide
  modified_base 9: mod_base = OTHER; note = 2'fluoro-nucleotide
  modified_base 10: mod_base = OTHER; note = 2'fluoro-nucleotide
  modified_base 11: mod_base = OTHER; note = 2'O-methyl-nucleotide
  modified_base 12: mod_base = OTHER; note = 2'O-methyl-nucleotide
  modified_base 13: mod_base = OTHER; note = 2'O-methyl-nucleotide
  modified_base 14: mod_base = OTHER; note = 2'O-methyl-nucleotide
  modified_base 15: mod_base = OTHER; note = 2'O-methyl-nucleotide
  modified_base 16: mod_base = OTHER; note = 2'O-methyl-nucleotide
  modified_base 17: mod_base = OTHER; note = 2'O-methyl-nucleotide
  modified_base 18: mod_base = OTHER; note = 2'O-methyl-nucleotide
  modified_base 19: mod_base = OTHER; note = 2'O-methyl-nucleotide phosphorothioate
  modified_base 20: mod_base = OTHER; note = 2'O-methyl-nucleotide phosphorothioate
  modified_base 21: mod_base = OTHER; note = Inverted abasic Cholesterol-triethylene glycol nucleotide
naagtgtggctcattaggcan

SEQ ID NO: 132 - RNA, 23 nt, synthetic construct
  source 1..23: mol_type = other RNA
  modified_base 1: mod_base = OTHER; note = Vinyl phosphonate 2'O-methyl-nucleotide phosphorothioate
  modified_base 2: mod_base = OTHER; note = 2'fluoro-nucleotide phosphorothioate
  modified_base 3: mod_base = OTHER; note = 2'O-methyl-nucleotide
  modified_base 4: mod_base = OTHER; note = 2'O-methyl-nucleotide
  modified_base 5: mod_base = OTHER; note = 2'O-methyl-nucleotide
  modified_base 6: mod_base = OTHER; note = 2'fluoro-nucleotide
  modified_base 7: mod_base = OTHER; note = 2'O-methyl-nucleotide
  modified_base 8: mod_base = OTHER; note = 2'fluoro-nucleotide
  modified_base 9: mod_base = OTHER; note = 2'fluoro-nucleotide
  modified_base 10: mod_base = OTHER; note = 2'O-methyl-nucleotide
  modified_base 11: mod_base = OTHER; note = 2'O-methyl-nucleotide
  modified_base 12: mod_base = OTHER; note = 2'O-methyl-nucleotide
  modified_base 13: mod_base = OTHER; note = 2'O-methyl-nucleotide
  modified_base 14: mod_base = OTHER; note = 2'fluoro-nucleotide
  modified_base 15: mod_base = OTHER; note = 2'O-methyl-nucleotide
  modified_base 16: mod_base = OTHER; note = 2'fluoro-nucleotide
  modified_base 17: mod_base = OTHER; note = 2'O-methyl-nucleotide
  modified_base 18: mod_base = OTHER; note = 2'O-methyl-nucleotide
  modified_base 19: mod_base = OTHER; note = 2'O-methyl-nucleotide
  modified_base 20: mod_base = OTHER; note = 2'O-methyl-nucleotide
  modified_base 21: mod_base = OTHER; note = 2'O-methyl-nucleotide phosphorothioate
  modified_base 22: mod_base = OTHER; note = 2'O-methyl-nucleotide phosphorothioate
  modified_base 23: mod_base = OTHER; note = 2'O-methyl-nucleotide
tgcctaatgagccacacttggag

SEQ ID NO: 133 - RNA, 21 nt, synthetic construct
  source 1..21: mol_type = other RNA
  modified_base 1: mod_base = OTHER; note = 2'O-methyl-nucleotide phosphorothioate
  modified_base 2: mod_base = OTHER; note = 2'O-methyl-nucleotide phosphorothioate
  modified_base 3: mod_base = OTHER; note = 2'O-methyl-nucleotide
  modified_base 4: mod_base = OTHER; note = 2'O-methyl-nucleotide
  modified_base 5: mod_base = OTHER; note = 2'O-methyl-nucleotide
  modified_base 6: mod_base = OTHER; note = 2'O-methyl-nucleotide
  modified_base 7: mod_base = OTHER; note = 2'fluoro-nucleotide
  modified_base 8: mod_base = OTHER; note = 2'O-methyl-nucleotide
  modified_base 9: mod_base = OTHER; note = 2'fluoro-nucleotide
  modified_base 10: mod_base = OTHER; note = 2'fluoro-nucleotide
  modified_base 11: mod_base = OTHER; note = 2'fluoro-nucleotide
  modified_base 12: mod_base = OTHER; note = 2'O-methyl-nucleotide
  modified_base 13: mod_base = OTHER; note = 2'O-methyl-nucleotide
  modified_base 14: mod_base = OTHER; note = 2'O-methyl-nucleotide
  modified_base 15: mod_base = OTHER; note = 2'O-methyl-nucleotide
  modified_base 16: mod_base = OTHER; note = 2'O-methyl-nucleotide
  modified_base 17: mod_base = OTHER; note = 2'O-methyl-nucleotide
  modified_base 18: mod_base = OTHER; note = 2'O-methyl-nucleotide
  modified_base 19: mod_base = OTHER; note = 2'O-methyl-nucleotide phosphorothioate
  modified_base 20: mod_base = OTHER; note = 2'O-methyl-nucleotide phosphorothioate
  modified_base 21: mod_base = OTHER; note = 2'O-methyl-Cholesterol-triethylene glycol nucleotide
ccaagtgtggctcattaggca

SEQ ID NO: 134 - RNA, 21 nt, synthetic construct
  source 1..21: mol_type = other RNA
  modified_base 1: mod_base = OTHER; note = Vinyl phosphonate 2'O-methyl-nucleotide phosphorothioate
  modified_base 2: mod_base = OTHER; note = 2'fluoro-nucleotide phosphorothioate
  modified_base 3: mod_base = OTHER; note = 2'O-methyl-nucleotide phosphorothioate
  modified_base 4: mod_base = OTHER; note = 2'fluoro-nucleotide
  modified_base 5: mod_base = OTHER; note = 2'O-methyl-nucleotide
  modified_base 6: mod_base = OTHER; note = 2'fluoro-nucleotide
  modified_base 7: mod_base = OTHER; note = 2'O-methyl-nucleotide
  modified_base 8: mod_base = OTHER; note = 2'fluoro-nucleotide
  modified_base 9: mod_base = OTHER; note = 2'O-methyl-nucleotide
  modified_base 10: mod_base = OTHER; note = 2'fluoro-nucleotide
  modified_base 11: mod_base = OTHER; note = 2'O-methyl-nucleotide
  modified_base 12: mod_base = OTHER; note = 2'fluoro-nucleotide
  modified_base 13: mod_base = OTHER; note = 2'O-methyl-nucleotide
  modified_base 14: mod_base = OTHER; note = 2'fluoro-nucleotide
  modified_base 15: mod_base = OTHER; note = 2'O-methyl-nucleotide
  modified_base 16: mod_base = OTHER; note = 2'fluoro-nucleotide
  modified_base 17: mod_base = OTHER; note = 2'O-methyl-nucleotide
  modified_base 18: mod_base = OTHER; note = 2'fluoro-nucleotide
  modified_base 19: mod_base = OTHER; note = 2'O-methyl-nucleotide
  modified_base 20: mod_base = OTHER; note = 2'O-methyl-nucleotide phosphorothioate
  modified_base 21: mod_base = OTHER; note = 2'O-methyl-nucleotide
tgcctaatgagccacacttgg

SEQ ID NO: 135 - RNA, 21 nt, synthetic construct
  source 1..21: mol_type = other RNA
  modified_base 1: mod_base = OTHER; note = Inverted abasic nucleotide phosphorothioate
  modified_base 2: mod_base = OTHER; note = 2'O-methyl-nucleotide phosphorothioate
  modified_base 3: mod_base = OTHER; note = 2'O-methyl-nucleotide
  modified_base 4: mod_base = OTHER; note = 2'O-methyl-nucleotide
  modified_base 5: mod_base = OTHER; note = 2'O-methyl-nucleotide
  modified_base 6: mod_base = OTHER; note = 2'O-methyl-nucleotide
  modified_base 7: mod_base = OTHER; note = 2'O-methyl-nucleotide
  modified_base 8: mod_base = OTHER; note = 2'fluoro-nucleotide
  modified_base 9: mod_base = OTHER; note = 2'fluoro-nucleotide
  modified_base 10: mod_base = OTHER; note = 2'fluoro-nucleotide
  modified_base 11: mod_base = OTHER; note = 2'O-methyl-nucleotide
  modified_base 12: mod_base = OTHER; note = 2'O-methyl-nucleotide
  modified_base 13: mod_base = OTHER; note = 2'O-methyl-nucleotide
  modified_base 14: mod_base = OTHER; note = 2'O-methyl-nucleotide
  modified_base 15: mod_base = OTHER; note = 2'O-methyl-nucleotide
  modified_base 16: mod_base = OTHER; note = 2'O-methyl-nucleotide
  modified_base 17: mod_base = OTHER; note = 2'O-methyl-nucleotide
  modified_base 18: mod_base = OTHER; note = 2'O-methyl-nucleotide
  modified_base 19: mod_base = OTHER; note = 2'O-methyl-nucleotide phosphorothioate
  modified_base 20: mod_base = OTHER; note = 2'O-methyl-nucleotide phosphorothioate
  modified_base 21: mod_base = OTHER; note = Inverted abasic Cholesterol-triethylene glycol nucleotide
naagtgtggctcattaggcan

SEQ ID NO: 136 - RNA, 21 nt, synthetic construct
  source 1..21: mol_type = other RNA
  modified_base 1: mod_base = OTHER; note = Vinyl phosphonate 2'O-methyl-nucleotide phosphorothioate
  modified_base 2: mod_base = OTHER; note = 2'fluoro-nucleotide phosphorothioate
  modified_base 3: mod_base = OTHER; note = 2'O-methyl-nucleotide
  modified_base 4: mod_base = OTHER; note = 2'O-methyl-nucleotide
  modified_base 5: mod_base = OTHER; note = 2'O-methyl-nucleotide
  modified_base 6: mod_base = OTHER; note = 2'fluoro-nucleotide
  modified_base 7: mod_base = OTHER; note = 2'O-methyl-nucleotide
  modified_base 8: mod_base = OTHER; note = 2'fluoro-nucleotide
  modified_base 9: mod_base = OTHER; note = 2'fluoro-nucleotide
  modified_base 10: mod_base = OTHER; note = 2'O-methyl-nucleotide
  modified_base 11: mod_base = OTHER; note = 2'O-methyl-nucleotide
  modified_base 12: mod_base = OTHER; note = 2'O-methyl-nucleotide
  modified_base 13: mod_base = OTHER; note = 2'O-methyl-nucleotide
  modified_base 14: mod_base = OTHER; note = 2'fluoro-nucleotide
  modified_base 15: mod_base = OTHER; note = 2'O-methyl-nucleotide
  modified_base 16: mod_base = OTHER; note = 2'fluoro-nucleotide
  modified_base 17: mod_base = OTHER; note = 2'O-methyl-nucleotide
  modified_base 18: mod_base = OTHER; note = 2'O-methyl-nucleotide
  modified_base 19: mod_base = OTHER; note = 2'O-methyl-nucleotide phosphorothioate
  modified_base 20: mod_base = OTHER; note = 2'O-methyl-nucleotide phosphorothioate
  modified_base 21: mod_base = OTHER; note = 2'O-methyl-nucleotide
tgcctaatgagccacacttgg

SEQ ID NO: 137 - RNA, 19 nt, synthetic construct
  source 1..19: mol_type = other RNA
  modified_base 1: mod_base = OTHER; note = 2'O-methyl-nucleotide phosphorothioate
  modified_base 2: mod_base = OTHER; note = 2'O-methyl-nucleotide phosphorothioate
  modified_base 3: mod_base = OTHER; note = 2'O-methyl-nucleotide
  modified_base 4: mod_base = OTHER; note = 2'O-methyl-nucleotide
  modified_base 5: mod_base = OTHER; note = 2'fluoro-nucleotide
  modified_base 6: mod_base = OTHER; note = 2'O-methyl-nucleotide
  modified_base 7: mod_base = OTHER; note = 2'fluoro-nucleotide
  modified_base 8: mod_base = OTHER; note = 2'fluoro-nucleotide
  modified_base 9: mod_base = OTHER; note = 2'fluoro-nucleotide
  modified_base 10: mod_base = OTHER; note = 2'O-methyl-nucleotide
  modified_base 11: mod_base = OTHER; note = 2'O-methyl-nucleotide
  modified_base 12: mod_base = OTHER; note = 2'O-methyl-nucleotide
  modified_base 13: mod_base = OTHER; note = 2'O-methyl-nucleotide
  modified_base 14: mod_base = OTHER; note = 2'O-methyl-nucleotide
  modified_base 15: mod_base = OTHER; note = 2'O-methyl-nucleotide
  modified_base 16: mod_base = OTHER; note = 2'O-methyl-nucleotide
  modified_base 17: mod_base = OTHER; note = 2'O-methyl-nucleotide phosphorothioate
  modified_base 18: mod_base = OTHER; note = 2'O-methyl-nucleotide phosphorothioate
  modified_base 19: mod_base = OTHER; note = 2'O-methyl-Cholesterol-triethylene glycol nucleotide
aagtgtggctcattaggca

SEQ ID NO: 138 - RNA, 21 nt, synthetic construct
  source 1..21: mol_type = other RNA
  modified_base 1: mod_base = OTHER; note = Vinyl phosphonate 2'O-methyl-nucleotide phosphorothioate
  modified_base 2: mod_base = OTHER; note = 2'fluoro-nucleotide phosphorothioate
  modified_base 3: mod_base = OTHER; note = 2'O-methyl-nucleotide phosphorothioate
  modified_base 4: mod_base = OTHER; note = 2'fluoro-nucleotide
  modified_base 5: mod_base = OTHER; note = 2'O-methyl-nucleotide
  modified_base 6: mod_base = OTHER; note = 2'fluoro-nucleotide
  modified_base 7: mod_base = OTHER; note = 2'O-methyl-nucleotide
  modified_base 8: mod_base = OTHER; note = 2'fluoro-nucleotide
  modified_base 9: mod_base = OTHER; note = 2'O-methyl-nucleotide
  modified_base 10: mod_base = OTHER; note = 2'fluoro-nucleotide
  modified_base 11: mod_base = OTHER; note = 2'O-methyl-nucleotide
  modified_base 12: mod_base = OTHER; note = 2'fluoro-nucleotide
  modified_base 13: mod_base = OTHER; note = 2'O-methyl-nucleotide
  modified_base 14: mod_base = OTHER; note = 2'fluoro-nucleotide
  modified_base 15: mod_base = OTHER; note = 2'O-methyl-nucleotide
  modified_base 16: mod_base = OTHER; note = 2'fluoro-nucleotide
  modified_base 17: mod_base = OTHER; note = 2'O-methyl-nucleotide
  modified_base 18: mod_base = OTHER; note = 2'fluoro-nucleotide
  modified_base 19: mod_base = OTHER; note = 2'O-methyl-nucleotide
  modified_base 20: mod_base = OTHER; note = 2'O-methyl-nucleotide phosphorothioate
  modified_base 21: mod_base = OTHER; note = 2'O-methyl-nucleotide
tgcctaatgagccacacttgg

SEQ ID NO: 139 - RNA, 21 nt, synthetic construct
  source 1..21: mol_type = other RNA
  modified_base 1: mod_base = OTHER; note = Inverted abasic nucleotide phosphorothioate
  modified_base 2: mod_base = OTHER; note = 2'O-methyl-nucleotide phosphorothioate
  modified_base 3: mod_base = OTHER; note = 2'O-methyl-nucleotide
  modified_base 4: mod_base = OTHER; note = 2'O-methyl-nucleotide
  modified_base 5: mod_base = OTHER; note = 2'O-methyl-nucleotide
  modified_base 6: mod_base = OTHER; note = 2'O-methyl-nucleotide
  modified_base 7: mod_base = OTHER; note = 2'O-methyl-nucleotide
  modified_base 8: mod_base = OTHER; note = 2'fluoro-nucleotide
  modified_base 9: mod_base = OTHER; note = 2'fluoro-nucleotide
  modified_base 10: mod_base = OTHER; note = 2'fluoro-nucleotide
  modified_base 11: mod_base = OTHER; note = 2'O-methyl-nucleotide
  modified_base 12: mod_base = OTHER; note = 2'O-methyl-nucleotide
  modified_base 13: mod_base = OTHER; note = 2'O-methyl-nucleotide
  modified_base 14: mod_base = OTHER; note = 2'O-methyl-nucleotide
  modified_base 15: mod_base = OTHER; note = 2'O-methyl-nucleotide
  modified_base 16: mod_base = OTHER; note = 2'O-methyl-nucleotide
  modified_base 17: mod_base = OTHER; note = 2'O-methyl-nucleotide
  modified_base 18: mod_base = OTHER; note = 2'O-methyl-nucleotide
  modified_base 19: mod_base = OTHER; note = 2'O-methyl-nucleotide phosphorothioate
  modified_base 20: mod_base = OTHER; note = 2'O-methyl-nucleotide phosphorothioate
  modified_base 21: mod_base = OTHER; note = Inverted abasic Cholesterol-triethylene glycol nucleotide
naagtgtggctcattaggcan

SEQ ID NO: 140 - RNA, 23 nt, synthetic construct
  source 1..23: mol_type = other RNA
  modified_base 1: mod_base = OTHER; note = Vinyl phosphonate 2'O-methyl-nucleotide phosphorothioate
  modified_base 2: mod_base = OTHER; note = 2'fluoro-nucleotide phosphorothioate
  modified_base 3: mod_base = OTHER; note = 2'O-methyl-nucleotide
  modified_base 4: mod_base = OTHER; note = 2'O-methyl-nucleotide
  modified_base 5: mod_base = OTHER; note = 2'O-methyl-nucleotide
  modified_base 6: mod_base = OTHER; note = 2'O-methyl-nucleotide
  modified_base 7: mod_base = OTHER; note = 2'fluoro-nucleotide
  modified_base 8: mod_base = OTHER; note = 2'O-methyl-nucleotide
  modified_base 9: mod_base = OTHER; note = 2'O-methyl-nucleotide
  modified_base 10: mod_base = OTHER; note = 2'O-methyl-nucleotide
  modified_base 11: mod_base = OTHER; note = 2'O-methyl-nucleotide
  modified_base 12: mod_base = OTHER; note = 2'fluoro-nucleotide
  modified_base 13: mod_base = OTHER; note = 2'O-methyl-nucleotide
  modified_base 14: mod_base = OTHER; note = 2'fluoro-nucleotide
  modified_base 15: mod_base = OTHER; note = 2'O-methyl-nucleotide
  modified_base 16: mod_base = OTHER; note = 2'O-methyl-nucleotide
  modified_base 17: mod_base = OTHER; note = 2'O-methyl-nucleotide
  modified_base 18: mod_base = OTHER; note = 2'O-methyl-nucleotide
  modified_base 19: mod_base = OTHER; note = 2'O-methyl-nucleotide
  modified_base 20: mod_base = OTHER; note = 2'O-methyl-nucleotide
  modified_base 21: mod_base = OTHER; note = 2'O-methyl-nucleotide phosphorothioate
  modified_base 22: mod_base = OTHER; note = 2'O-methyl-nucleotide phosphorothioate
  modified_base 23: mod_base = OTHER; note = 2'O-methyl-nucleotide
tgcctaatgagccacacttggtt

SEQ ID NO: 141 - RNA, 21 nt, synthetic construct
  source 1..21: mol_type = other RNA
  modified_base 1: mod_base = OTHER; note = 2'O-methyl-nucleotide phosphorothioate
  modified_base 2: mod_base = OTHER; note = 2'O-methyl-nucleotide phosphorothioate
  modified_base 3: mod_base = OTHER; note = 2'O-methyl-nucleotide
  modified_base 4: mod_base = OTHER; note = 2'O-methyl-nucleotide
  modified_base 5: mod_base = OTHER; note = 2'O-methyl-nucleotide
  modified_base 6: mod_base = OTHER; note = 2'O-methyl-nucleotide
  modified_base 7: mod_base = OTHER; note = 2'O-methyl-nucleotide
  modified_base 8: mod_base = OTHER; note = 2'O-methyl-nucleotide
  modified_base 9: mod_base = OTHER; note = 2'fluoro-nucleotide
  modified_base 10: mod_base = OTHER; note = 2'O-methyl-nucleotide
  modified_base 11: mod_base = OTHER; note = 2'fluoro-nucleotide
  modified_base 12: mod_base = OTHER; note = 2'fluoro-nucleotide
  modified_base 13: mod_base = OTHER; note = 2'fluoro-nucleotide
  modified_base 14: mod_base = OTHER; note = 2'fluoro-nucleotide
  modified_base 15: mod_base = OTHER; note = 2'O-methyl-nucleotide
  modified_base 16: mod_base = OTHER; note = 2'O-methyl-nucleotide
  modified_base 17: mod_base = OTHER; note = 2'O-methyl-nucleotide
  modified_base 18: mod_base = OTHER; note = 2'O-methyl-nucleotide
  modified_base 19: mod_base = OTHER; note = 2'O-methyl-nucleotide
  modified_base 20: mod_base = OTHER; note = 2'O-methyl-nucleotide phosphorothioate
  modified_base 21: mod_base = OTHER; note = Inverted abasic Cholesterol-triethylene glycol nucleotide
caagtgtggctcattaggcan

SEQ ID NO: 142 - RNA, 21 nt, synthetic construct
  source 1..21: mol_type = other RNA
  modified_base 1: mod_base = OTHER; note = Vinyl phosphonate 2'O-methyl-nucleotide phosphorothioate
  modified_base 2: mod_base = OTHER; note = 2'fluoro-nucleotide phosphorothioate
  modified_base 3: mod_base = OTHER; note = 2'O-methyl-nucleotide phosphorothioate
  modified_base 4: mod_base = OTHER; note = 2'fluoro-nucleotide
  modified_base 5: mod_base = OTHER; note = 2'O-methyl-nucleotide
  modified_base 6: mod_base = OTHER; note = 2'fluoro-nucleotide
  modified_base 7: mod_base = OTHER; note = 2'O-methyl-nucleotide
  modified_base 8: mod_base = OTHER; note = 2'fluoro-nucleotide
  modified_base 9: mod_base = OTHER; note = 2'O-methyl-nucleotide
  modified_base 10: mod_base = OTHER; note = 2'fluoro-nucleotide
  modified_base 11: mod_base = OTHER; note = 2'O-methyl-nucleotide
  modified_base 12: mod_base = OTHER; note = 2'fluoro-nucleotide
  modified_base 13: mod_base = OTHER; note = 2'O-methyl-nucleotide
  modified_base 14: mod_base = OTHER; note = 2'fluoro-nucleotide
  modified_base 15: mod_base = OTHER; note = 2'O-methyl-nucleotide
  modified_base 16: mod_base = OTHER; note = 2'fluoro-nucleotide
  modified_base 17: mod_base = OTHER; note = 2'O-methyl-nucleotide
  modified_base 18: mod_base = OTHER; note = 2'fluoro-nucleotide
  modified_base 19: mod_base = OTHER; note = 2'O-methyl-nucleotide
  modified_base 20: mod_base = OTHER; note = 2'O-methyl-nucleotide phosphorothioate
  modified_base 21: mod_base = OTHER; note = 2'O-methyl-nucleotide
tgcctaatgagccacacttgg

SEQ ID NO: 143 - RNA, 23 nt, synthetic construct
  source 1..23: mol_type = other RNA
  modified_base 1: mod_base = OTHER; note = Inverted abasic nucleotide phosphorothioate
  modified_base 2: mod_base = OTHER; note = 2'O-methyl-nucleotide phosphorothioate
  modified_base 3: mod_base = OTHER; note = 2'O-methyl-nucleotide
  modified_base 4: mod_base = OTHER; note = 2'O-methyl-nucleotide
  modified_base 5: mod_base = OTHER; note = 2'O-methyl-nucleotide
  modified_base 6: mod_base = OTHER; note = 2'O-methyl-nucleotide
  modified_base 7: mod_base = OTHER; note = 2'O-methyl-nucleotide
  modified_base 8: mod_base = OTHER; note = 2'O-methyl-nucleotide
  modified_base 9: mod_base = OTHER; note = 2'O-methyl-nucleotide
  modified_base 10: mod_base = OTHER; note = 2'fluoro-nucleotide
  modified_base 11: mod_base = OTHER; note = 2'fluoro-nucleotide
  modified_base 12: mod_base = OTHER; note = 2'fluoro-nucleotide
  modified_base 13: mod_base = OTHER; note = 2'O-methyl-nucleotide
  modified_base 14: mod_base = OTHER; note = 2'O-methyl-nucleotide
  modified_base 15: mod_base = OTHER; note = 2'O-methyl-nucleotide
  modified_base 16: mod_base = OTHER; note = 2'O-methyl-nucleotide
  modified_base 17: mod_base = OTHER; note = 2'O-methyl-nucleotide
  modified_base 18: mod_base = OTHER; note = 2'O-methyl-nucleotide
  modified_base 19: mod_base = OTHER; note = 2'O-methyl-nucleotide
  modified_base 20: mod_base = OTHER; note = 2'O-methyl-nucleotide
  modified_base 21: mod_base = OTHER; note = 2'O-methyl-nucleotide phosphorothioate
  modified_base 22: mod_base = OTHER; note = 2'O-methyl-nucleotide phosphorothioate
  modified_base 23: mod_base = OTHER; note = Inverted abasic Cholesterol-triethylene glycol nucleotide
nccaagtgtggctcattaggcan

SEQ ID NO: 144 - RNA, 23 nt, synthetic construct
  source 1..23: mol_type = other RNA
  modified_base 1: mod_base = OTHER; note = Vinyl phosphonate 2'O-methyl-nucleotide phosphorothioate
  modified_base 2: mod_base = OTHER; note = 2'fluoro-nucleotide phosphorothioate
  modified_base 3: mod_base = OTHER; note = 2'O-methyl-nucleotide
  modified_base 4: mod_base = OTHER; note = 2'O-methyl-nucleotide
  modified_base 5: mod_base = OTHER; note = 2'O-methyl-nucleotide
  modified_base 6: mod_base = OTHER; note = 2'fluoro-nucleotide
  modified_base 7: mod_base = OTHER; note = 2'O-methyl-nucleotide
  modified_base 8: mod_base = OTHER; note = 2'fluoro-nucleotide
  modified_base 9: mod_base = OTHER; note = 2'fluoro-nucleotide
  modified_base 10: mod_base = OTHER; note = 2'O-methyl-nucleotide
  modified_base 11: mod_base = OTHER; note = 2'O-methyl-nucleotide
  modified_base 12: mod_base = OTHER; note = 2'O-methyl-nucleotide
  modified_base 13: mod_base = OTHER; note = 2'O-methyl-nucleotide
  modified_base 14: mod_base = OTHER; note = 2'fluoro-nucleotide
  modified_base 15: mod_base = OTHER; note = 2'O-methyl-nucleotide
  modified_base 16: mod_base = OTHER; note = 2'fluoro-nucleotide
  modified_base 17: mod_base = OTHER; note = 2'O-methyl-nucleotide
  modified_base 18: mod_base = OTHER; note = 2'O-methyl-nucleotide
  modified_base 19: mod_base = OTHER; note = 2'O-methyl-nucleotide
  modified_base 20: mod_base = OTHER; note = 2'O-methyl-nucleotide
  modified_base 21: mod_base = OTHER; note = 2'O-methyl-nucleotide phosphorothioate
  modified_base 22: mod_base = OTHER; note = 2'O-methyl-nucleotide phosphorothioate
  modified_base 23: mod_base = OTHER; note = 2'O-methyl-nucleotide
tgcctaatgagccacacttggag

SEQ ID NO: 145 - RNA, 23 nt, synthetic construct
  source 1..23: mol_type = other RNA
  modified_base 1: mod_base = OTHER; note = Inverted abasic nucleotide phosphorothioate
  modified_base 2: mod_base = OTHER; note = 2'O-methyl-nucleotide phosphorothioate
  modified_base 3: mod_base = OTHER; note = 2'O-methyl-nucleotide
  modified_base 4: mod_base = OTHER; note = 2'O-methyl-nucleotide
  modified_base 5: mod_base = OTHER; note = 2'O-methyl-nucleotide
  modified_base 6: mod_base = OTHER; note = 2'O-methyl-nucleotide
  modified_base 7: mod_base = OTHER; note = 2'O-methyl-nucleotide
  modified_base 8: mod_base = OTHER; note = 2'O-methyl-nucleotide
  modified_base 9: mod_base = OTHER; note = 2'O-methyl-nucleotide
  modified_base 10: mod_base = OTHER; note = 2'fluoro-nucleotide
  modified_base 11: mod_base = OTHER; note = 2'fluoro-nucleotide
  modified_base 12: mod_base = OTHER; note = 2'fluoro-nucleotide
  modified_base 13: mod_base = OTHER; note = 2'O-methyl-nucleotide
  modified_base 14: mod_base = OTHER; note = 2'O-methyl-nucleotide
  modified_base 15: mod_base = OTHER; note = 2'O-methyl-nucleotide
  modified_base 16: mod_base = OTHER; note = 2'O-methyl-nucleotide
  modified_base 17: mod_base = OTHER; note = 2'O-methyl-nucleotide
  modified_base 18: mod_base = OTHER; note = 2'O-methyl-nucleotide
  modified_base 19: mod_base = OTHER; note = 2'O-methyl-nucleotide
  modified_base 20: mod_base = OTHER; note = 2'O-methyl-nucleotide
  modified_base 21: mod_base = OTHER; note = 2'O-methyl-nucleotide phosphorothioate
  modified_base 22: mod_base = OTHER; note = 2'O-methyl-nucleotide phosphorothioate
  modified_base 23: mod_base = OTHER; note = Inverted abasic Cholesterol-triethylene glycol nucleotide
nccaagtgtggctcattaggcan

SEQ ID NO: 146 - RNA, 21 nt, synthetic construct
  source 1..21: mol_type = other RNA
  modified_base 1: mod_base = OTHER; note = Vinyl phosphonate 2'O-methyl-nucleotide phosphorothioate
  modified_base 2: mod_base = OTHER; note = 2'fluoro-nucleotide phosphorothioate
  modified_base 3: mod_base = OTHER; note = 2'O-methyl-nucleotide
  modified_base 4: mod_base = OTHER; note = 2'O-methyl-nucleotide
  modified_base 5: mod_base = OTHER; note = 2'O-methyl-nucleotide
  modified_base 6: mod_base = OTHER; note = 2'fluoro-nucleotide
  modified_base 7: mod_base = OTHER; note = 2'O-methyl-nucleotide
  modified_base 8: mod_base = OTHER; note = 2'fluoro-nucleotide
  modified_base 9: mod_base = OTHER; note = 2'fluoro-nucleotide
  modified_base 10: mod_base = OTHER; note = 2'O-methyl-nucleotide
  modified_base 11: mod_base = OTHER; note = 2'O-methyl-nucleotide
  modified_base 12: mod_base = OTHER; note = 2'O-methyl-nucleotide
  modified_base 13: mod_base = OTHER; note = 2'O-methyl-nucleotide
  modified_base 14: mod_base = OTHER; note = 2'fluoro-nucleotide
  modified_base 15: mod_base = OTHER; note = 2'O-methyl-nucleotide
  modified_base 16: mod_base = OTHER; note = 2'fluoro-nucleotide
  modified_base 17: mod_base = OTHER; note = 2'O-methyl-nucleotide
  modified_base 18: mod_base = OTHER; note = 2'O-methyl-nucleotide
  modified_base 19: mod_base = OTHER; note = 2'O-methyl-nucleotide phosphorothioate
  modified_base 20: mod_base = OTHER; note = 2'O-methyl-nucleotide phosphorothioate
  modified_base 21: mod_base = OTHER; note = 2'O-methyl-nucleotide
tgcctaatgagccacacttgg

SEQ ID NO: 147 - RNA, 23 nt, synthetic construct
  source 1..23: mol_type = other RNA
  modified_base 1: mod_base = OTHER; note = Inverted abasic nucleotide phosphorothioate
  modified_base 2: mod_base = OTHER; note = 2'O-methyl-nucleotide phosphorothioate
  modified_base 3: mod_base = OTHER; note = 2'O-methyl-nucleotide
  modified_base 4: mod_base = OTHER; note = 2'O-methyl-nucleotide
  modified_base 5: mod_base = OTHER; note = 2'O-methyl-nucleotide
  modified_base 6: mod_base = OTHER; note = 2'O-methyl-nucleotide
  modified_base 7: mod_base = OTHER; note = 2'O-methyl-nucleotide
  modified_base 8: mod_base = OTHER; note = 2'O-methyl-nucleotide
  modified_base 9: mod_base = OTHER; note = 2'O-methyl-nucleotide
  modified_base 10: mod_base = OTHER; note = 2'fluoro-nucleotide
  modified_base 11: mod_base = OTHER; note = 2'fluoro-nucleotide
  modified_base 12: mod_base = OTHER; note = 2'fluoro-nucleotide
  modified_base 13: mod_base = OTHER; note = 2'O-methyl-nucleotide
  modified_base 14: mod_base = OTHER; note = 2'O-methyl-nucleotide
  modified_base 15: mod_base = OTHER; note = 2'O-methyl-nucleotide
  modified_base 16: mod_base = OTHER; note = 2'O-methyl-nucleotide
  modified_base 17: mod_base = OTHER; note = 2'O-methyl-nucleotide
  modified_base 18: mod_base = OTHER; note = 2'O-methyl-nucleotide
  modified_base 19: mod_base = OTHER; note = 2'O-methyl-nucleotide
  modified_base 20: mod_base = OTHER; note = 2'O-methyl-nucleotide
  modified_base 21: mod_base = OTHER; note = 2'O-methyl-nucleotide phosphorothioate
  modified_base 22: mod_base = OTHER; note = 2'O-methyl-nucleotide phosphorothioate
  modified_base 23: mod_base = OTHER; note = Inverted abasic Cholesterol-triethylene glycol nucleotide
nccaagtgtggctcattaggcan

SEQ ID NO: 148 - RNA, 23 nt, synthetic construct
  source 1..23: mol_type = other RNA
  modified_base 1: mod_base = OTHER; note = Vinyl phosphonate 2'O-methyl-nucleotide phosphorothioate
  modified_base 2: mod_base = OTHER; note = 2'fluoro-nucleotide phosphorothioate
  modified_base 3: mod_base = OTHER; note = 2'O-methyl-nucleotide
  modified_base 4: mod_base = OTHER; note = 2'O-methyl-nucleotide
  modified_base 5: mod_base = OTHER; note = 2'O-methyl-nucleotide
  modified_base 6: mod_base = OTHER; note = 2'O-methyl-nucleotide
  modified_base 7: mod_base = OTHER; note = 2'fluoro-nucleotide
  modified_base 8: mod_base = OTHER; note = 2'O-methyl-nucleotide
  modified_base 9: mod_base = OTHER; note = 2'O-methyl-nucleotide
  modified_base 10: mod_base = OTHER; note = 2'O-methyl-nucleotide
  modified_base 11: mod_base = OTHER; note = 2'O-methyl-nucleotide
  modified_base 12: mod_base = OTHER; note = 2'fluoro-nucleotide
  modified_base 13: mod_base = OTHER; note = 2'O-methyl-nucleotide
  modified_base 14: mod_base = OTHER; note = 2'fluoro-nucleotide
  modified_base 15: mod_base = OTHER; note = 2'O-methyl-nucleotide
  modified_base 16: mod_base = OTHER; note = 2'O-methyl-nucleotide
  modified_base 17: mod_base = OTHER; note = 2'O-methyl-nucleotide
  modified_base 18: mod_base = OTHER; note = 2'O-methyl-nucleotide
  modified_base 19: mod_base = OTHER; note = 2'O-methyl-nucleotide
  modified_base 20: mod_base = OTHER; note = 2'O-methyl-nucleotide
  modified_base 21: mod_base = OTHER; note = 2'O-methyl-nucleotide phosphorothioate
  modified_base 22: mod_base = OTHER; note = 2'O-methyl-nucleotide phosphorothioate
  modified_base 23: mod_base = OTHER; note = 2'O-methyl-nucleotide
tgcctaatgagccacacttggtt

SEQ ID NO: 149 - RNA, 21 nt, synthetic construct
  source 1..21: mol_type = other RNA
  modified_base 1: mod_base = OTHER; note = 2'O-methyl-nucleotide phosphorothioate
  modified_base 2: mod_base = OTHER; note = 2'O-methyl-nucleotide phosphorothioate
  modified_base 3: mod_base = OTHER; note = 2'O-methyl-nucleotide
  modified_base 4: mod_base = OTHER; note = 2'O-methyl-nucleotide
  modified_base 5: mod_base = OTHER; note = 2'O-methyl-nucleotide
  modified_base 6: mod_base = OTHER; note = 2'O-methyl-nucleotide
  modified_base 7: mod_base = OTHER; note = 2'fluoro-nucleotide
  modified_base 8: mod_base = OTHER; note = 2'O-methyl-nucleotide
  modified_base 9: mod_base = OTHER; note = 2'fluoro-nucleotide
  modified_base 10: mod_base = OTHER; note = 2'fluoro-nucleotide
  modified_base 11: mod_base = OTHER; note = 2'fluoro-nucleotide
  modified_base 12: mod_base = OTHER; note = 2'O-methyl-nucleotide
  modified_base 13: mod_base = OTHER; note = 2'O-methyl-nucleotide
  modified_base 14: mod_base = OTHER; note = 2'O-methyl-nucleotide
  modified_base 15: mod_base = OTHER; note = 2'O-methyl-nucleotide
  modified_base 16: mod_base = OTHER; note = 2'O-methyl-nucleotide
  modified_base 17: mod_base = OTHER; note = 2'O-methyl-nucleotide
  modified_base 18: mod_base = OTHER; note = 2'O-methyl-nucleotide
  modified_base 19: mod_base = OTHER; note = 2'O-methyl-nucleotide phosphorothioate
  modified_base 20: mod_base = OTHER; note = 2'O-methyl-nucleotide phosphorothioate
  modified_base 21: mod_base = OTHER; note = 2'O-methyl-Cholesterol-triethylene glycol nucleotide
ccaagtgtggctcattaggca

SEQ ID NO: 150 - RNA, 23 nt, synthetic construct
  source 1..23: mol_type = other RNA
  modified_base 1: mod_base = OTHER; note = Vinyl phosphonate 2'O-methyl-nucleotide phosphorothioate
  modified_base 2: mod_base = OTHER; note = 2'fluoro-nucleotide phosphorothioate
  modified_base 3: mod_base = OTHER; note = 2'O-methyl-nucleotide
  modified_base 4: mod_base = OTHER; note = 2'O-methyl-nucleotide
  modified_base 5: mod_base = OTHER; note = 2'O-methyl-nucleotide
  modified_base 6: mod_base = OTHER; note = 2'fluoro-nucleotide
  modified_base 7: mod_base = OTHER; note = 2'O-methyl-nucleotide
  modified_base 8: mod_base = OTHER; note = 2'O-methyl-nucleotide
  modified_base 9: mod_base = OTHER; note = 2'fluoro-nucleotide
  modified_base 10: mod_base = OTHER; note = 2'O-methyl-nucleotide
  modified_base 11: mod_base = OTHER; note = 2'O-methyl-nucleotide
  modified_base 12: mod_base = OTHER; note = 2'O-methyl-nucleotide
  modified_base 13: mod_base = OTHER; note = 2'O-methyl-nucleotide
  modified_base 14: mod_base = OTHER; note = 2'fluoro-nucleotide
  modified_base 15: mod_base = OTHER; note = 2'O-methyl-nucleotide
  modified_base 16: mod_base = OTHER; note = 2'fluoro-nucleotide
  modified_base 17: mod_base = OTHER; note = 2'O-methyl-nucleotide
  modified_base 18: mod_base = OTHER; note = 2'O-methyl-nucleotide
  modified_base 19: mod_base = OTHER; note = 2'O-methyl-nucleotide
  modified_base 20: mod_base = OTHER; note = 2'O-methyl-nucleotide
  modified_base 21: mod_base = OTHER; note = 2'O-methyl-nucleotide phosphorothioate
  modified_base 22: mod_base = OTHER; note = 2'O-methyl-nucleotide phosphorothioate
  modified_base 23: mod_base = OTHER; note = 2'O-methyl-nucleotide
tgcctaatgagccacacttggag

SEQ ID NO: 151 - RNA, 21 nt, synthetic construct
  source 1..21: mol_type = other RNA
  modified_base 1: mod_base = OTHER; note = 2'O-methyl-nucleotide phosphorothioate
  modified_base 2: mod_base = OTHER; note = 2'O-methyl-nucleotide phosphorothioate
  modified_base 3: mod_base = OTHER; note = 2'O-methyl-nucleotide
  modified_base 4: mod_base = OTHER; note = 2'O-methyl-nucleotide
  modified_base 5: mod_base = OTHER; note = 2'O-methyl-nucleotide
  modified_base 6: mod_base = OTHER; note = 2'O-methyl-nucleotide
  modified_base 7: mod_base = OTHER; note = 2'fluoro-nucleotide
  modified_base 8: mod_base = OTHER; note = 2'O-methyl-nucleotide
  modified_base 9: mod_base = OTHER; note = 2'fluoro-nucleotide
  modified_base 10: mod_base = OTHER; note = 2'fluoro-nucleotide
  modified_base 11: mod_base = OTHER; note = 2'fluoro-nucleotide
  modified_base 12: mod_base = OTHER; note = 2'O-methyl-nucleotide
  modified_base 13: mod_base = OTHER; note = 2'O-methyl-nucleotide
  modified_base 14: mod_base = OTHER; note = 2'O-methyl-nucleotide
  modified_base 15: mod_base = OTHER; note = 2'O-methyl-nucleotide
  modified_base 16: mod_base = OTHER; note = 2'O-methyl-nucleotide
  modified_base 17: mod_base = OTHER; note = 2'O-methyl-nucleotide
  modified_base 18: mod_base = OTHER; note = 2'O-methyl-nucleotide
  modified_base 19: mod_base = OTHER; note = 2'O-methyl-nucleotide phosphorothioate
  modified_base 20: mod_base = OTHER; note = 2'O-methyl-nucleotide phosphorothioate
  modified_base 21: mod_base = OTHER; note = 2'O-methyl-Cholesterol-triethylene glycol nucleotide
ccaagtgtggctcattaggca

SEQ ID NO: 152 - RNA, 23 nt, synthetic construct
  source 1..23: mol_type = other RNA
  modified_base 1: mod_base = OTHER; note = Vinyl phosphonate 2'O-methyl-nucleotide phosphorothioate
  modified_base 2: mod_base = OTHER; note = 2'fluoro-nucleotide phosphorothioate
  modified_base 3: mod_base = OTHER; note = 2'O-methyl-nucleotide
  modified_base 4: mod_base = OTHER; note = 2'O-methyl-nucleotide
  modified_base 5: mod_base = OTHER; note = 2'O-methyl-nucleotide
  modified_base 6: mod_base = OTHER; note = 2'fluoro-nucleotide
  modified_base 7: mod_base = OTHER; note = 2'O-methyl-nucleotide
  modified_base 8: mod_base = OTHER; note = 2'fluoro-nucleotide
  modified_base 9: mod_base = OTHER; note = 2'O-methyl-nucleotide
  modified_base 10: mod_base = OTHER; note = 2'O-methyl-nucleotide
  modified_base 11: mod_base = OTHER; note = 2'O-methyl-nucleotide
  modified_base 12: mod_base = OTHER; note = 2'O-methyl-nucleotide
  modified_base 13: mod_base = OTHER; note = 2'O-methyl-nucleotide
  modified_base 14: mod_base = OTHER; note = 2'fluoro-nucleotide
  modified_base 15: mod_base = OTHER; note = 2'O-methyl-nucleotide
  modified_base 16: mod_base = OTHER; note = 2'fluoro-nucleotide
  modified_base 17: mod_base = OTHER; note = 2'O-methyl-nucleotide
  modified_base 18: mod_base = OTHER; note = 2'O-methyl-nucleotide
  modified_base 19: mod_base = OTHER; note = 2'O-methyl-nucleotide
  modified_base 20: mod_base = OTHER; note = 2'O-methyl-nucleotide
  modified_base 21: mod_base = OTHER; note = 2'O-methyl-nucleotide phosphorothioate
  modified_base 22: mod_base = OTHER; note = 2'O-methyl-nucleotide phosphorothioate
  modified_base 23: mod_base = OTHER; note = 2'O-methyl-nucleotide
tgcctaatgagccacacttggag

SEQ ID NO: 153 - RNA, 21 nt, synthetic construct
  source 1..21: mol_type = other RNA
  modified_base 1: mod_base = OTHER; note = 2'O-methyl-nucleotide phosphorothioate
  modified_base 2: mod_base = OTHER; note = 2'O-methyl-nucleotide phosphorothioate
  modified_base 3: mod_base = OTHER; note = 2'O-methyl-nucleotide
  modified_base 4: mod_base = OTHER; note = 2'O-methyl-nucleotide
  modified_base 5: mod_base = OTHER; note = 2'O-methyl-nucleotide
  modified_base 6: mod_base = OTHER; note = 2'O-methyl-nucleotide
  modified_base 7: mod_base = OTHER; note = 2'fluoro-nucleotide
  modified_base 8: mod_base = OTHER; note = 2'O-methyl-nucleotide
  modified_base 9: mod_base = OTHER; note = 2'fluoro-nucleotide
  modified_base 10: mod_base = OTHER; note = 2'fluoro-nucleotide
  modified_base 11: mod_base = OTHER; note = 2'fluoro-nucleotide
  modified_base 12: mod_base = OTHER; note = 2'O-methyl-nucleotide
  modified_base 13: mod_base = OTHER; note = 2'O-methyl-nucleotide
  modified_base 14: mod_base = OTHER; note = 2'O-methyl-nucleotide
  modified_base 15: mod_base = OTHER; note = 2'O-methyl-nucleotide
  modified_base 16: mod_base = OTHER; note = 2'O-methyl-nucleotide
  modified_base 17: mod_base = OTHER; note = 2'O-methyl-nucleotide
  modified_base 18: mod_base = OTHER; note = 2'O-methyl-nucleotide
  modified_base 19: mod_base = OTHER; note = 2'O-methyl-nucleotide phosphorothioate
  modified_base 20: mod_base = OTHER; note = 2'O-methyl-nucleotide phosphorothioate
  modified_base 21: mod_base = OTHER; note = 2'O-methyl-Cholesterol-triethylene glycol nucleotide
ccaagtgtggctcattaggca

SEQ ID NO: 154 - RNA, 23 nt, synthetic construct
  source 1..23: mol_type = other RNA
  modified_base 1: mod_base = OTHER; note = Vinyl phosphonate 2'O-methyl-nucleotide phosphorothioate
  modified_base 2: mod_base = OTHER; note = 2'fluoro-nucleotide phosphorothioate
  modified_base 3: mod_base = OTHER; note = 2'O-methyl-nucleotide
  modified_base 4: mod_base = OTHER; note = 2'O-methyl-nucleotide
  modified_base 5: mod_base = OTHER; note = 2'O-methyl-nucleotide
  modified_base 6: mod_base = OTHER; note = 2'fluoro-nucleotide
  modified_base 7: mod_base = OTHER; note = 2'O-methyl-nucleotide
  modified_base 8: mod_base = OTHER; note = 2'O-methyl-nucleotide
  modified_base 9: mod_base = OTHER; note = 2'O-methyl-nucleotide
  modified_base 10: mod_base = OTHER; note = 2'O-methyl-nucleotide
  modified_base 11: mod_base = OTHER; note = 2'O-methyl-nucleotide
  modified_base 12: mod_base = OTHER; note = 2'O-methyl-nucleotide
  modified_base 13: mod_base = OTHER; note = 2'O-methyl-nucleotide
  modified_base 14: mod_base = OTHER; note = 2'fluoro-nucleotide
  modified_base 15: mod_base = OTHER; note = 2'O-methyl-nucleotide
  modified_base 16: mod_base = OTHER; note = 2'fluoro-nucleotide
  modified_base 17: mod_base = OTHER; note = 2'O-methyl-nucleotide
  modified_base 18: mod_base = OTHER; note = 2'O-methyl-nucleotide
  modified_base 19: mod_base = OTHER; note = 2'O-methyl-nucleotide
  modified_base 20: mod_base = OTHER; note = 2'O-methyl-nucleotide
  modified_base 21: mod_base = OTHER; note = 2'O-methyl-nucleotide phosphorothioate
  modified_base 22: mod_base = OTHER; note = 2'O-methyl-nucleotide phosphorothioate
  modified_base 23: mod_base = OTHER; note = 2'O-methyl-nucleotide
tgcctaatgagccacacttggag

SEQ ID NO: 155-164 - skipped (10 entries)

SEQ ID NO: 165 - RNA, 19 nt, synthetic construct
  source 1..19: mol_type = other RNA
  modified_base 1: mod_base = OTHER; note = 2'O-methyl-nucleotide phosphorothioate
  modified_base 2: mod_base = OTHER; note = 2'O-methyl-nucleotide phosphorothioate
  modified_base 3: mod_base = OTHER; note = 2'O-methyl-nucleotide
  modified_base 4: mod_base = OTHER; note = 2'O-methyl-nucleotide
  modified_base 5: mod_base = OTHER; note = 2'fluoro-nucleotide
  modified_base 6: mod_base = OTHER; note = 2'O-methyl-nucleotide
  modified_base 7: mod_base = OTHER; note = 2'fluoro-nucleotide
  modified_base 8: mod_base = OTHER; note = 2'fluoro-nucleotide
  modified_base 9: mod_base = OTHER; note = 2'fluoro-nucleotide
  modified_base 10: mod_base = OTHER; note = 2'O-methyl-nucleotide
  modified_base 11: mod_base = OTHER; note = 2'O-methyl-nucleotide
  modified_base 12: mod_base = OTHER; note = 2'O-methyl-nucleotide
  modified_base 13: mod_base = OTHER; note = 2'O-methyl-nucleotide
  modified_base 14: mod_base = OTHER; note = 2'O-methyl-nucleotide
  modified_base 15: mod_base = OTHER; note = 2'O-methyl-nucleotide
  modified_base 16: mod_base = OTHER; note = 2'O-methyl-nucleotide
  modified_base 17: mod_base = OTHER; note = 2'O-methyl-nucleotide phosphorothioate
  modified_base 18: mod_base = OTHER; note = 2'O-methyl-nucleotide phosphorothioate
  modified_base 19: mod_base = OTHER; note = 2'O-methyl-Cholesterol-triethylene glycol nucleotide
aagtgtggctcattaggca

SEQ ID NO: 166 - RNA, 21 nt, synthetic construct
  source 1..21: mol_type = other RNA
  modified_base 1: mod_base = OTHER; note = Vinyl phosphonate 2'O-methyl-nucleotide phosphorothioate
  modified_base 2: mod_base = OTHER; note = 2'fluoro-nucleotide phosphorothioate
  modified_base 3: mod_base = OTHER; note = 2'O-methyl-nucleotide
  modified_base 4: mod_base = OTHER; note = 2'O-methyl-nucleotide
  modified_base 5: mod_base = OTHER; note = 2'O-methyl-nucleotide
  modified_base 6: mod_base = OTHER; note = 2'fluoro-nucleotide
  modified_base 7: mod_base = OTHER; note = 2'O-methyl-nucleotide
  modified_base 8: mod_base = OTHER; note = 2'O-methyl-nucleotide
  modified_base 9: mod_base = OTHER; note = 2'O-methyl-nucleotide
  modified_base 10: mod_base = OTHER; note = 2'O-methyl-nucleotide
  modified_base 11: mod_base = OTHER; note = 2'O-methyl-nucleotide
  modified_base 12: mod_base = OTHER; note = 2'O-methyl-nucleotide
  modified_base 13: mod_base = OTHER; note = 2'O-methyl-nucleotide
  modified_base 14: mod_base = OTHER; note = 2'fluoro-nucleotide
  modified_base 15: mod_base = OTHER; note = 2'O-methyl-nucleotide
  modified_base 16: mod_base = OTHER; note = 2'fluoro-nucleotide
  modified_base 17: mod_base = OTHER; note = 2'O-methyl-nucleotide
  modified_base 18: mod_base = OTHER; note = 2'O-methyl-nucleotide
  modified_base 19: mod_base = OTHER; note = 2'O-methyl-nucleotide phosphorothioate
  modified_base 20: mod_base = OTHER; note = 2'O-methyl-nucleotide phosphorothioate
  modified_base 21: mod_base = OTHER; note = 2'O-methyl-nucleotide
tgcctaatgagccacacttgg

SEQ ID NO: 167 - RNA, 21 nt, synthetic construct
  source 1..21: mol_type = other RNA
  modified_base 1: mod_base = OTHER; note = 2'O-methyl-nucleotide phosphorothioate
  modified_base 2: mod_base = OTHER; note = 2'O-methyl-nucleotide phosphorothioate
  modified_base 3: mod_base = OTHER; note = 2'fluoro-nucleotide
  modified_base 4: mod_base = OTHER; note = 2'O-methyl-nucleotide
  modified_base 5: mod_base = OTHER; note = 2'fluoro-nucleotide
  modified_base 6: mod_base = OTHER; note = 2'O-methyl-nucleotide
  modified_base 7: mod_base = OTHER; note = 2'fluoro-nucleotide
  modified_base 8: mod_base = OTHER; note = 2'O-methyl-nucleotide
  modified_base 9: mod_base = OTHER; note = 2'fluoro-nucleotide
  modified_base 10: mod_base = OTHER; note = 2'O-methyl-nucleotide
  modified_base 11: mod_base = OTHER; note = 2'fluoro-nucleotide
  modified_base 12: mod_base = OTHER; note = 2'O-methyl-nucleotide
  modified_base 13: mod_base = OTHER; note = 2'fluoro-nucleotide
  modified_base 14: mod_base = OTHER; note = 2'O-methyl-nucleotide
  modified_base 15: mod_base = OTHER; note = 2'fluoro-nucleotide
  modified_base 16: mod_base = OTHER; note = 2'O-methyl-nucleotide
  modified_base 17: mod_base = OTHER; note = 2'fluoro-nucleotide
  modified_base 18: mod_base = OTHER; note = 2'O-methyl-nucleotide
  modified_base 19: mod_base = OTHER; note = 2'fluoro-nucleotide phosphorothioate
  modified_base 20: mod_base = OTHER; note = 2'O-methyl-nucleotide phosphorothioate
  modified_base 21: mod_base = OTHER; note = 2'O-methyl-Cholesterol-triethylene glycol nucleotide
agtctacaaaccagttgaatt

SEQ ID NO: 168 - RNA, 21 nt, synthetic construct
  source 1..21: mol_type = other RNA
  modified_base 1: mod_base = OTHER; note = Vinyl phosphonate 2'O-methyl-nucleotide phosphorothioate
  modified_base 2: mod_base = OTHER; note = 2'fluoro-nucleotide phosphorothioate
  modified_base 3: mod_base = OTHER; note = 2'O-methyl-nucleotide
  modified_base 4: mod_base = OTHER; note = 2'fluoro-nucleotide
  modified_base 5: mod_base = OTHER; note = 2'O-methyl-nucleotide
  modified_base 6: mod_base = OTHER; note = 2'fluoro-nucleotide
  modified_base 7: mod_base = OTHER; note = 2'O-methyl-nucleotide
  modified_base 8: mod_base = OTHER; note = 2'fluoro-nucleotide
  modified_base 9: mod_base = OTHER; note = 2'O-methyl-nucleotide
  modified_base 10: mod_base = OTHER; note = 2'fluoro-nucleotide
  modified_base 11: mod_base = OTHER; note = 2'O-methyl-nucleotide
  modified_base 12: mod_base = OTHER; note = 2'fluoro-nucleotide
  modified_base 13: mod_base = OTHER; note = 2'O-methyl-nucleotide
  modified_base 14: mod_base = OTHER; note = 2'fluoro-nucleotide
  modified_base 15: mod_base = OTHER; note = 2'O-methyl-nucleotide
  modified_base 16: mod_base = OTHER; note = 2'fluoro-nucleotide
  modified_base 17: mod_base = OTHER; note = 2'O-methyl-nucleotide
  modified_base 18: mod_base = OTHER; note = 2'fluoro-nucleotide
  modified_base 19: mod_base = OTHER; note = 2'O-methyl-nucleotide phosphorothioate
  modified_base 20: mod_base = OTHER; note = 2'O-methyl-nucleotide phosphorothioate
  modified_base 21: mod_base = OTHER; note = 2'O-methyl-nucleotide
ttcaactggtttgtagacttt

SEQ ID NO: 169 - RNA, 21 nt, synthetic construct
  source 1..21: mol_type = other RNA
  modified_base 1: mod_base = OTHER; note = 2'O-methyl-nucleotide phosphorothioate
  modified_base 2: mod_base = OTHER; note = 2'O-methyl-nucleotide phosphorothioate
  modified_base 3: mod_base = OTHER; note = 2'fluoro-nucleotide
  modified_base 4: mod_base = OTHER; note = 2'O-methyl-nucleotide
  modified_base 5: mod_base = OTHER; note = 2'fluoro-nucleotide
  modified_base 6: mod_base = OTHER; note = 2'O-methyl-nucleotide
  modified_base 7: mod_base = OTHER; note = 2'fluoro-nucleotide
  modified_base 8: mod_base = OTHER; note = 2'O-methyl-nucleotide
  modified_base 9: mod_base = OTHER; note = 2'fluoro-nucleotide
  modified_base 10: mod_base = OTHER; note = 2'O-methyl-nucleotide
  modified_base 11: mod_base = OTHER; note = 2'fluoro-nucleotide
  modified_base 12: mod_base = OTHER; note = 2'O-methyl-nucleotide
  modified_base 13: mod_base = OTHER; note = 2'fluoro-nucleotide
  modified_base 14: mod_base = OTHER; note = 2'O-methyl-nucleotide
  modified_base 15: mod_base = OTHER; note = 2'fluoro-nucleotide
  modified_base 16: mod_base = OTHER; note = 2'O-methyl-nucleotide
  modified_base 17: mod_base = OTHER; note = 2'fluoro-nucleotide
  modified_base 18: mod_base = OTHER; note = 2'O-methyl-nucleotide
  modified_base 19: mod_base = OTHER; note = 2'fluoro-nucleotide phosphorothioate
  modified_base 20: mod_base = OTHER; note = 2'O-methyl-nucleotide phosphorothioate
  modified_base 21: mod_base = OTHER; note = 2'O-methyl-Cholesterol-triethylene glycol nucleotide
aagtgtggctcattaggcatt

SEQ ID NO: 170 - RNA, 21 nt, synthetic construct
  source 1..21: mol_type = other RNA
  modified_base 1: mod_base = OTHER; note = Vinyl phosphonate 2'O-methyl-nucleotide phosphorothioate
  modified_base 2: mod_base = OTHER; note = 2'fluoro-nucleotide phosphorothioate
  modified_base 3: mod_base = OTHER; note = 2'O-methyl-nucleotide
  modified_base 4: mod_base = OTHER; note = 2'fluoro-nucleotide
  modified_base 5: mod_base = OTHER; note = 2'O-methyl-nucleotide
  modified_base 6: mod_base = OTHER; note = 2'fluoro-nucleotide
  modified_base 7: mod_base = OTHER; note = 2'O-methyl-nucleotide
  modified_base 8: mod_base = OTHER; note = 2'fluoro-nucleotide
  modified_base 9: mod_base = OTHER; note = 2'O-methyl-nucleotide
  modified_base 10: mod_base = OTHER; note = 2'fluoro-nucleotide
  modified_base 11: mod_base = OTHER; note = 2'O-methyl-nucleotide
  modified_base 12: mod_base = OTHER; note = 2'fluoro-nucleotide
  modified_base 13: mod_base = OTHER; note = 2'O-methyl-nucleotide
  modified_base 14: mod_base = OTHER; note = 2'fluoro-nucleotide
  modified_base 15: mod_base = OTHER; note = 2'O-methyl-nucleotide
  modified_base 16: mod_base = OTHER; note = 2'fluoro-nucleotide
  modified_base 17: mod_base = OTHER; note = 2'O-methyl-nucleotide
  modified_base 18: mod_base = OTHER; note = 2'fluoro-nucleotide
  modified_base 19: mod_base = OTHER; note = 2'O-methyl-nucleotide phosphorothioate
  modified_base 20: mod_base = OTHER; note = 2'O-methyl-nucleotide phosphorothioate
  modified_base 21: mod_base = OTHER; note = 2'O-methyl-nucleotide
tgcctaatgagccacactttt

SEQ ID NO: 171 - RNA, 19 nt, synthetic construct
  source 1..19: mol_type = other RNA
  modified_base 1: mod_base = OTHER; note = 2'O-methyl-nucleotide phosphorothioate
  modified_base 2: mod_base = OTHER; note = 2'O-methyl-nucleotide phosphorothioate
  modified_base 3: mod_base = OTHER; note = 2'fluoro-nucleotide
  modified_base 4: mod_base = OTHER; note = 2'O-methyl-nucleotide
  modified_base 5: mod_base = OTHER; note = 2'O-methyl-nucleotide
  modified_base 6: mod_base = OTHER; note = 2'O-methyl-nucleotide
  modified_base 7: mod_base = OTHER; note = 2'fluoro-nucleotide
  modified_base 8: mod_base = OTHER; note = 2'fluoro-nucleotide
  modified_base 9: mod_base = OTHER; note = 2'O-methyl-nucleotide
  modified_base 10: mod_base = OTHER; note = 2'O-methyl-nucleotide
  modified_base 11: mod_base = OTHER; note = 2'O-methyl-nucleotide
  modified_base 12: mod_base = OTHER; note = 2'fluoro-nucleotide
  modified_base 13: mod_base = OTHER; note = 2'O-methyl-nucleotide
  modified_base 14: mod_base = OTHER; note = 2'O-methyl-nucleotide
  modified_base 15: mod_base = OTHER; note = 2'O-methyl-nucleotide
  modified_base 16: mod_base = OTHER; note = 2'O-methyl-nucleotide
  modified_base 17: mod_base = OTHER; note = 2'fluoro-nucleotide
  modified_base 18: mod_base = OTHER; note = 2'O-methyl-nucleotide
  modified_base 19: mod_base = OTHER; note = 2'O-methyl-Cholesterol-triethylene glycol nucleotide
agtctacaaaccagttgaa

SEQ ID NO: 172 - RNA, 21 nt, synthetic construct
  source 1..21: mol_type = other RNA
  modified_base 1: mod_base = OTHER; note = Vinyl phosphonate 2'O-methyl-nucleotide phosphorothioate
  modified_base 2: mod_base = OTHER; note = 2'fluoro-nucleotide phosphorothioate
  modified_base 3: mod_base = OTHER; note = 2'O-methyl-nucleotide
  modified_base 4: mod_base = OTHER; note = 2'O-methyl-nucleotide
  modified_base 5: mod_base = OTHER; note = 2'O-methyl-nucleotide
  modified_base 6: mod_base = OTHER; note = 2'fluoro-nucleotide
  modified_base 7: mod_base = OTHER; note = 2'O-methyl-nucleotide
  modified_base 8: mod_base = OTHER; note = 2'O-methyl-nucleotide
  modified_base 9: mod_base = OTHER; note = 2'O-methyl-nucleotide
  modified_base 10: mod_base = OTHER; note = 2'O-methyl-nucleotide
  modified_base 11: mod_base = OTHER; note = 2'O-methyl-nucleotide
  modified_base 12: mod_base = OTHER; note = 2'O-methyl-nucleotide
  modified_base 13: mod_base = OTHER; note = 2'O-methyl-nucleotide
  modified_base 14: mod_base = OTHER; note = 2'fluoro-nucleotide
  modified_base 15: mod_base = OTHER; note = 2'O-methyl-nucleotide
  modified_base 16: mod_base = OTHER; note = 2'fluoro-nucleotide
  modified_base 17: mod_base = OTHER; note = 2'O-methyl-nucleotide
  modified_base 18: mod_base = OTHER; note = 2'O-methyl-nucleotide
  modified_base 19: mod_base = OTHER; note = 2'O-methyl-nucleotide phosphorothioate
  modified_base 20: mod_base = OTHER; note = 2'O-methyl-nucleotide phosphorothioate
  modified_base 21: mod_base = OTHER; note = 2'O-methyl-nucleotide
tgcctaatgagccacacttgg

SEQ ID NO: 173 - RNA, 19 nt, synthetic construct
  source 1..19: mol_type = other RNA
  modified_base 1: mod_base = OTHER; note = 2'O-methyl-nucleotide phosphorothioate
  modified_base 2: mod_base = OTHER; note = 2'O-methyl-nucleotide phosphorothioate
  modified_base 3: mod_base = OTHER; note = 2'fluoro-nucleotide
  modified_base 4: mod_base = OTHER; note = 2'O-methyl-nucleotide
  modified_base 5: mod_base = OTHER; note = 2'O-methyl-nucleotide
  modified_base 6: mod_base = OTHER; note = 2'O-methyl-nucleotide
  modified_base 7: mod_base = OTHER; note = 2'fluoro-nucleotide
  modified_base 8: mod_base = OTHER; note = 2'fluoro-nucleotide
  modified_base 9: mod_base = OTHER; note = 2'fluoro-nucleotide
  modified_base 10: mod_base = OTHER; note = 2'O-methyl-nucleotide
  modified_base 11: mod_base = OTHER; note = 2'O-methyl-nucleotide
  modified_base 12: mod_base = OTHER; note = 2'fluoro-nucleotide
  modified_base 13: mod_base = OTHER; note = 2'O-methyl-nucleotide
  modified_base 14: mod_base = OTHER; note = 2'O-methyl-nucleotide
  modified_base 15: mod_base = OTHER; note = 2'O-methyl-nucleotide
  modified_base 16: mod_base = OTHER; note = 2'O-methyl-nucleotide
  modified_base 17: mod_base = OTHER; note = 2'fluoro-nucleotide
  modified_base 18: mod_base = OTHER; note = 2'O-methyl-nucleotide
  modified_base 19: mod_base = OTHER; note = 2'O-methyl-Cholesterol-triethylene glycol nucleotide
aagtgtggctcattaggca

SEQ ID NO: 174 - RNA, 21 nt, synthetic construct
  source 1..21: mol_type = other RNA
  modified_base 1: mod_base = OTHER; note = Vinyl phosphonate 2'O-methyl-nucleotide phosphorothioate
  modified_base 2: mod_base = OTHER; note = 2'fluoro-nucleotide phosphorothioate
  modified_base 3: mod_base = OTHER; note = 2'O-methyl-nucleotide
  modified_base 4: mod_base = OTHER; note = 2'O-methyl-nucleotide
  modified_base 5: mod_base = OTHER; note = 2'O-methyl-nucleotide
  modified_base 6: mod_base = OTHER; note = 2'fluoro-nucleotide
  modified_base 7: mod_base = OTHER; note = Glycol nucleotide
  modified_base 8: mod_base = OTHER; note = 2'O-methyl-nucleotide
  modified_base 9: mod_base = OTHER; note = 2'O-methyl-nucleotide
  modified_base 10: mod_base = OTHER; note = 2'O-methyl-nucleotide
  modified_base 11: mod_base = OTHER; note = 2'O-methyl-nucleotide
  modified_base 12: mod_base = OTHER; note = 2'O-methyl-nucleotide
  modified_base 13: mod_base = OTHER; note = 2'O-methyl-nucleotide
  modified_base 14: mod_base = OTHER; note = 2'fluoro-nucleotide
  modified_base 15: mod_base = OTHER; note = 2'O-methyl-nucleotide
  modified_base 16: mod_base = OTHER; note = 2'fluoro-nucleotide
  modified_base 17: mod_base = OTHER; note = 2'O-methyl-nucleotide
  modified_base 18: mod_base = OTHER; note = 2'O-methyl-nucleotide
  modified_base 19: mod_base = OTHER; note = 2'O-methyl-nucleotide phosphorothioate
  modified_base 20: mod_base = OTHER; note = 2'O-methyl-nucleotide phosphorothioate
  modified_base 21: mod_base = OTHER; note = 2'O-methyl-nucleotide
tgcctaatgagccacacttgg

SEQ ID NO: 175 - RNA, 22 nt, synthetic construct
  source 1..22: mol_type = other RNA
  modified_base 1: mod_base = OTHER; note = 2'O-methyl-nucleotide phosphorothioate
  modified_base 2: mod_base = OTHER; note = 2'fluoro-nucleotide phosphorothioate
  modified_base 3: mod_base = OTHER; note = 2'O-methyl-nucleotide
  modified_base 4: mod_base = OTHER; note = 2'fluoro-nucleotide
  modified_base 5: mod_base = OTHER; note = 2'O-methyl-nucleotide
  modified_base 6: mod_base = OTHER; note = 2'fluoro-nucleotide
  modified_base 7: mod_base = OTHER; note = 2'O-methyl-nucleotide
  modified_base 8: mod_base = OTHER; note = 2'fluoro-nucleotide
  modified_base 9: mod_base = OTHER; note = 2'O-methyl-nucleotide
  modified_base 10: mod_base = OTHER; note = 2'fluoro-nucleotide
  modified_base 11: mod_base = OTHER; note = 2'O-methyl-nucleotide
  modified_base 12: mod_base = OTHER; note = 2'fluoro-nucleotide
  modified_base 13: mod_base = OTHER; note = 2'O-methyl-nucleotide
  modified_base 14: mod_base = OTHER; note = 2'fluoro-nucleotide
  modified_base 15: mod_base = OTHER; note = 2'O-methyl-nucleotide
  modified_base 16: mod_base = OTHER; note = 2'fluoro-nucleotide
  modified_base 17: mod_base = OTHER; note = 2'O-methyl-nucleotide
  modified_base 18: mod_base = OTHER; note = 2'fluoro-nucleotide
  modified_base 19: mod_base = OTHER; note = 2'O-methyl-nucleotide
  modified_base 20: mod_base = OTHER; note = 2'fluoro-nucleotide phosphorothioate
  modified_base 21: mod_base = OTHER; note = 2'O-methyl-nucleotide phosphorothioate
  modified_base 22: mod_base = OTHER; note = 2'O-methyl-Cholesterol-triethylene glycol nucleotide
gcatggtcagtaaaagcaaatt

SEQ ID NO: 176 - RNA, 22 nt, synthetic construct
  source 1..22: mol_type = other RNA
  modified_base 1: mod_base = OTHER; note = Vinyl phosphonate 2'O-methyl-nucleotide phosphorothioate
  modified_base 2: mod_base = OTHER; note = 2'fluoro-nucleotide phosphorothioate
  modified_base 3: mod_base = OTHER; note = 2'O-methyl-nucleotide
  modified_base 4: mod_base = OTHER; note = 2'fluoro-nucleotide
  modified_base 5: mod_base = OTHER; note = 2'O-methyl-nucleotide
  modified_base 6: mod_base = OTHER; note = 2'fluoro-nucleotide
  modified_base 7: mod_base = OTHER; note = 2'O-methyl-nucleotide
  modified_base 8: mod_base = OTHER; note = 2'fluoro-nucleotide
  modified_base 9: mod_base = OTHER; note = 2'O-methyl-nucleotide
  modified_base 10: mod_base = OTHER; note = 2'fluoro-nucleotide
  modified_base 11: mod_base = OTHER; note = 2'O-methyl-nucleotide
  modified_base 12: mod_base = OTHER; note = 2'fluoro-nucleotide
  modified_base 13: mod_base = OTHER; note = 2'O-methyl-nucleotide
  modified_base 14: mod_base = OTHER; note = 2'fluoro-nucleotide
  modified_base 15: mod_base = OTHER; note = 2'O-methyl-nucleotide
  modified_base 16: mod_base = OTHER; note = 2'fluoro-nucleotide
  modified_base 17: mod_base = OTHER; note = 2'O-methyl-nucleotide
  modified_base 18: mod_base = OTHER; note = 2'fluoro-nucleotide
  modified_base 19: mod_base = OTHER; note = 2'O-methyl-nucleotide
  modified_base 20: mod_base = OTHER; note = 2'fluoro-nucleotide phosphorothioate
  modified_base 21: mod_base = OTHER; note = 2'O-methyl-nucleotide phosphorothioate
  modified_base 22: mod_base = OTHER; note = 2'O-methyl-nucleotide
tttgcttttactgaccatgctt

SEQ ID NO: 177 - RNA, 21 nt, synthetic construct
  source 1..21: mol_type = other RNA
  modified_base 1: mod_base = OTHER; note = 2'O-methyl-nucleotide phosphorothioate
  modified_base 2: mod_base = OTHER; note = 2'fluoro-nucleotide phosphorothioate
  modified_base 3: mod_base = OTHER; note = 2'O-methyl-nucleotide
  modified_base 4: mod_base = OTHER; note = 2'fluoro-nucleotide
  modified_base 5: mod_base = OTHER; note = 2'O-methyl-nucleotide
  modified_base 6: mod_base = OTHER; note = 2'fluoro-nucleotide
  modified_base 7: mod_base = OTHER; note = 2'O-methyl-nucleotide
  modified_base 8: mod_base = OTHER; note = 2'fluoro-nucleotide
  modified_base 9: mod_base = OTHER; note = 2'O-methyl-nucleotide
  modified_base 10: mod_base = OTHER; note = 2'fluoro-nucleotide
  modified_base 11: mod_base = OTHER; note = 2'O-methyl-nucleotide
  modified_base 12: mod_base = OTHER; note = 2'fluoro-nucleotide
  modified_base 13: mod_base = OTHER; note = 2'O-methyl-nucleotide
  modified_base 14: mod_base = OTHER; note = 2'fluoro-nucleotide
  modified_base 15: mod_base = OTHER; note = 2'O-methyl-nucleotide
  modified_base 16: mod_base = OTHER; note = 2'fluoro-nucleotide
  modified_base 17: mod_base = OTHER; note = 2'O-methyl-nucleotide
  modified_base 18: mod_base = OTHER; note = 2'fluoro-nucleotide
  modified_base 19: mod_base = OTHER; note = 2'O-methyl-nucleotide phosphorothioate
  modified_base 20: mod_base = OTHER; note = 2'O-methyl-nucleotide phosphorothioate
  modified_base 21: mod_base = OTHER; note = 2'O-methyl-Cholesterol-triethylene glycol nucleotide
agtactgcttacgatacggtt

SEQ ID NO: 178 - RNA, 21 nt, synthetic construct
  source 1..21: mol_type = other RNA
  modified_base 1: mod_base = OTHER; note = Vinyl phosphonate 2'O-methyl-nucleotide phosphorothioate
  modified_base 2: mod_base = OTHER; note = 2'fluoro-nucleotide phosphorothioate
  modified_base 3: mod_base = OTHER; note = 2'O-methyl-nucleotide
  modified_base 4: mod_base = OTHER; note = 2'fluoro-nucleotide
  modified_base 5: mod_base = OTHER; note = 2'O-methyl-nucleotide
  modified_base 6: mod_base = OTHER; note = 2'fluoro-nucleotide
  modified_base 7: mod_base = OTHER; note = 2'O-methyl-nucleotide
  modified_base 8: mod_base = OTHER; note = 2'fluoro-nucleotide
  modified_base 9: mod_base = OTHER; note = 2'O-methyl-nucleotide
  modified_base 10: mod_base = OTHER; note = 2'fluoro-nucleotide
  modified_base 11: mod_base = OTHER; note = 2'O-methyl-nucleotide
  modified_base 12: mod_base = OTHER; note = 2'fluoro-nucleotide
  modified_base 13: mod_base = OTHER; note = 2'O-methyl-nucleotide
  modified_base 14: mod_base = OTHER; note = 2'fluoro-nucleotide
  modified_base 15: mod_base = OTHER; note = 2'O-methyl-nucleotide
  modified_base 16: mod_base = OTHER; note = 2'fluoro-nucleotide
  modified_base 17: mod_base = OTHER; note = 2'O-methyl-nucleotide
  modified_base 18: mod_base = OTHER; note = 2'fluoro-nucleotide
  modified_base 19: mod_base = OTHER; note = 2'O-methyl-nucleotide phosphorothioate
  modified_base 20: mod_base = OTHER; note = 2'O-methyl-nucleotide phosphorothioate
  modified_base 21: mod_base = OTHER; note = 2'O-methyl-nucleotide
tcgtatcgtaagcagtacttt

SEQ ID NO: 179 - RNA, 19 nt, synthetic construct
  source 1..19: mol_type = other RNA
  modified_base 1: mod_base = OTHER; note 2'O-methyl-N,N'-((((2R,3R,4R,5R)-4-hydroxy-5-(hydroxymethyl )tetrahydrofuran-2,3-diyl)bis(oxy))bis(propane-3,1-diyl))di palmitamide nucleotide phosphorothioate
  modified_base 2: mod_base = OTHER; note = 2'O-methyl-nucleotide phosphorothioate
  modified_base 3: mod_base = OTHER; note = 2'fluoro-nucleotide
  modified_base 4: mod_base = OTHER; note = 2'O-methyl-nucleotide
  modified_base 5: mod_base = OTHER; note = 2'O-methyl-nucleotide
  modified_base 6: mod_base = OTHER; note = 2'O-methyl-nucleotide
  modified_base 7: mod_base = OTHER; note = 2'fluoro-nucleotide
  modified_base 8: mod_base = OTHER; note = 2'fluoro-nucleotide
  modified_base 9: mod_base = OTHER; note = 2'fluoro-nucleotide
  modified_base 10: mod_base = OTHER; note = 2'O-methyl-nucleotide
  modified_base 11: mod_base = OTHER; note = 2'O-methyl-nucleotide
  modified_base 12: mod_base = OTHER; note = 2'fluoro-nucleotide
  modified_base 13: mod_base = OTHER; note = 2'O-methyl-nucleotide
  modified_base 14: mod_base = OTHER; note = 2'O-methyl-nucleotide
  modified_base 15: mod_base = OTHER; note = 2'O-methyl-nucleotide
  modified_base 16: mod_base = OTHER; note = 2'O-methyl-nucleotide
  modified_base 17: mod_base = OTHER; note = 2'fluoro-nucleotide phosphorothioate
  modified_base 18: mod_base = OTHER; note = 2'O-methyl-nucleotide phosphorothioate
  modified_base 19: mod_base = OTHER; note = 2'O-methyl-nucleotide
aagtgtggctcattaggca

SEQ ID NO: 180 - RNA, 21 nt, synthetic construct
  source 1..21: mol_type = other RNA
  modified_base 1: mod_base = OTHER; note = Vinyl phosphonate 2'O-methyl-nucleotide phosphorothioate
  modified_base 2: mod_base = OTHER; note = 2'fluoro-nucleotide phosphorothioate
  modified_base 3: mod_base = OTHER; note = 2'O-methyl-nucleotide
  modified_base 4: mod_base = OTHER; note = 2'O-methyl-nucleotide
  modified_base 5: mod_base = OTHER; note = 2'O-methyl-nucleotide
  modified_base 6: mod_base = OTHER; note = 2'fluoro-nucleotide
  modified_base 7: mod_base = OTHER; note = 2'O-methyl-nucleotide
  modified_base 8: mod_base = OTHER; note = 2'O-methyl-nucleotide
  modified_base 9: mod_base = OTHER; note = 2'O-methyl-nucleotide
  modified_base 10: mod_base = OTHER; note = 2'O-methyl-nucleotide
  modified_base 11: mod_base = OTHER; note = 2'O-methyl-nucleotide
  modified_base 12: mod_base = OTHER; note = 2'O-methyl-nucleotide
  modified_base 13: mod_base = OTHER; note = 2'O-methyl-nucleotide
  modified_base 14: mod_base = OTHER; note = 2'fluoro-nucleotide
  modified_base 15: mod_base = OTHER; note = 2'O-methyl-nucleotide
  modified_base 16: mod_base = OTHER; note = 2'fluoro-nucleotide
  modified_base 17: mod_base = OTHER; note = 2'O-methyl-nucleotide
  modified_base 18: mod_base = OTHER; note = 2'O-methyl-nucleotide
  modified_base 19: mod_base = OTHER; note = 2'O-methyl-nucleotide phosphorothioate
  modified_base 20: mod_base = OTHER; note = 2'O-methyl-nucleotide phosphorothioate
  modified_base 21: mod_base = OTHER; note = 2'O-methyl-nucleotide
tgcctaatgagccacacttgg

SEQ ID NO: 181 - DNA, 21 bp, synthetic construct
  source 1..21: mol_type = other DNA
  modified_base 1: mod_base = OTHER; note = 2'O-methyl-nucleotide phosphorothioate
  modified_base 2: mod_base = OTHER; note = 2'O-methyl-nucleotide phosphorothioate
  modified_base 3: mod_base = OTHER; note = 2'fluoro-nucleotide
  modified_base 4: mod_base = OTHER; note = 2'O-methyl-nucleotide
  modified_base 5: mod_base = OTHER; note = 2'O-methyl-nucleotide
  modified_base 6: mod_base = OTHER; note = 2'O-methyl-nucleotide
  modified_base 7: mod_base = OTHER; note = 2'fluoro-nucleotide
  modified_base 8: mod_base = OTHER; note = 2'fluoro-nucleotide
  modified_base 9: mod_base = OTHER; note = 2'fluoro-nucleotide
  modified_base 10: mod_base = OTHER; note = 2'O-methyl-nucleotide
  modified_base 11: mod_base = OTHER; note = 2'O-methyl-nucleotide
  modified_base 12: mod_base = OTHER; note = 2'fluoro-nucleotide
  modified_base 13: mod_base = OTHER; note = 2'O-methyl-nucleotide
  modified_base 14: mod_base = OTHER; note = 2'O-methyl-nucleotide
  modified_base 15: mod_base = OTHER; note = 2'O-methyl-nucleotide
  modified_base 16: mod_base = OTHER; note = 2'O-methyl-nucleotide
  modified_base 17: mod_base = OTHER; note = 2'fluoro-nucleotide phosphorothioate
  modified_base 18: mod_base = OTHER; note = 2'O-methyl-nucleotide phosphorothioate
  modified_base 19: mod_base = OTHER; note = 2'O-methyl-nucleotide
  modified_base 21: mod_base = OTHER; note N,N'-((((2R,3R,4R,5R)-4-hydroxy-5-(hydroxymethyl)tetrahydro furan-2,3-diyl)bis(oxy))bis(propane-3,1-diyl))dipalmitamide deoxy-thymidine
  misc_feature 1..19: note = RNA
  misc_feature 20..21: note = DNA
aagtgtggctcattaggcatt

SEQ ID NO: 182 - RNA, 21 nt, synthetic construct
  source 1..21: mol_type = other RNA
  modified_base 1: mod_base = OTHER; note = Vinyl phosphonate 2'O-methyl-nucleotide phosphorothioate
  modified_base 2: mod_base = OTHER; note = 2'fluoro-nucleotide phosphorothioate
  modified_base 3: mod_base = OTHER; note = 2'O-methyl-nucleotide
  modified_base 4: mod_base = OTHER; note = 2'O-methyl-nucleotide
  modified_base 5: mod_base = OTHER; note = 2'O-methyl-nucleotide
  modified_base 6: mod_base = OTHER; note = 2'fluoro-nucleotide
  modified_base 7: mod_base = OTHER; note = 2'O-methyl-nucleotide
  modified_base 8: mod_base = OTHER; note = 2'O-methyl-nucleotide
  modified_base 9: mod_base = OTHER; note = 2'O-methyl-nucleotide
  modified_base 10: mod_base = OTHER; note = 2'O-methyl-nucleotide
  modified_base 11: mod_base = OTHER; note = 2'O-methyl-nucleotide
  modified_base 12: mod_base = OTHER; note = 2'O-methyl-nucleotide
  modified_base 13: mod_base = OTHER; note = 2'O-methyl-nucleotide
  modified_base 14: mod_base = OTHER; note = 2'fluoro-nucleotide
  modified_base 15: mod_base = OTHER; note = 2'O-methyl-nucleotide
  modified_base 16: mod_base = OTHER; note = 2'fluoro-nucleotide
  modified_base 17: mod_base = OTHER; note = 2'O-methyl-nucleotide
  modified_base 18: mod_base = OTHER; note = 2'O-methyl-nucleotide
  modified_base 19: mod_base = OTHER; note = 2'O-methyl-nucleotide phosphorothioate
  modified_base 20: mod_base = OTHER; note = 2'O-methyl-nucleotide phosphorothioate
  modified_base 21: mod_base = OTHER; note = 2'O-methyl-nucleotide
tgcctaatgagccacacttgg

SEQ ID NO: 183-186 - skipped (4 entries)

SEQ ID NO: 187 - RNA, 19 nt, synthetic construct
  source 1..19: mol_type = other RNA
  modified_base 1: mod_base = OTHER; note 2'O-methyl-N,N'-((((2R,3R,4R,5R)-4-hydroxy-5-(hydroxymethyl )tetrahydrofuran-2,3-diyl)bis(oxy))bis(propane-3,1-diyl))di palmitamide nucleotide phosphorothioate
  modified_base 2: mod_base = OTHER; note = 2'O-methyl-nucleotide phosphorothioate
  modified_base 3: mod_base = OTHER; note = 2'fluoro-nucleotide
  modified_base 4: mod_base = OTHER; note = 2'O-methyl-nucleotide
  modified_base 5: mod_base = OTHER; note = 2'O-methyl-nucleotide
  modified_base 6: mod_base = OTHER; note = 2'O-methyl-nucleotide
  modified_base 7: mod_base = OTHER; note = 2'fluoro-nucleotide
  modified_base 8: mod_base = OTHER; note = 2'fluoro-nucleotide
  modified_base 9: mod_base = OTHER; note = 2'fluoro-nucleotide
  modified_base 10: mod_base = OTHER; note = 2'O-methyl-nucleotide
  modified_base 11: mod_base = OTHER; note = 2'O-methyl-nucleotide
  modified_base 12: mod_base = OTHER; note = 2'fluoro-nucleotide
  modified_base 13: mod_base = OTHER; note = 2'O-methyl-nucleotide
  modified_base 14: mod_base = OTHER; note = 2'O-methyl-nucleotide
  modified_base 15: mod_base = OTHER; note = 2'O-methyl-nucleotide
  modified_base 16: mod_base = OTHER; note = 2'O-methyl-nucleotide
  modified_base 17: mod_base = OTHER; note = 2'fluoro-nucleotide phosphorothioate
  modified_base 18: mod_base = OTHER; note = 2'O-methyl-nucleotide phosphorothioate
  modified_base 19: mod_base = OTHER; note = 2'O-methyl-nucleotide
aagtgtggctcattaggca

SEQ ID NO: 188 - RNA, 21 nt, synthetic construct
  source 1..21: mol_type = other RNA
  modified_base 1: mod_base = OTHER; note = Vinyl phosphonate 2'O-methyl-nucleotide phosphorothioate
  modified_base 2: mod_base = OTHER; note = 2'fluoro-nucleotide phosphorothioate
  modified_base 3: mod_base = OTHER; note = 2'O-methyl-nucleotide
  modified_base 4: mod_base = OTHER; note = 2'O-methyl-nucleotide
  modified_base 5: mod_base = OTHER; note = 2'O-methyl-nucleotide
  modified_base 6: mod_base = OTHER; note = 2'fluoro-nucleotide
  modified_base 7: mod_base = OTHER; note = Glycol nucleotide
  modified_base 8: mod_base = OTHER; note = 2'O-methyl-nucleotide
  modified_base 9: mod_base = OTHER; note = 2'O-methyl-nucleotide
  modified_base 10: mod_base = OTHER; note = 2'O-methyl-nucleotide
  modified_base 11: mod_base = OTHER; note = 2'O-methyl-nucleotide
  modified_base 12: mod_base = OTHER; note = 2'O-methyl-nucleotide
  modified_base 13: mod_base = OTHER; note = 2'O-methyl-nucleotide
  modified_base 14: mod_base = OTHER; note = 2'fluoro-nucleotide
  modified_base 15: mod_base = OTHER; note = 2'O-methyl-nucleotide
  modified_base 16: mod_base = OTHER; note = 2'fluoro-nucleotide
  modified_base 17: mod_base = OTHER; note = 2'O-methyl-nucleotide
  modified_base 18: mod_base = OTHER; note = 2'O-methyl-nucleotide
  modified_base 19: mod_base = OTHER; note = 2'O-methyl-nucleotide phosphorothioate
  modified_base 20: mod_base = OTHER; note = 2'O-methyl-nucleotide phosphorothioate
  modified_base 21: mod_base = OTHER; note = 2'O-methyl-nucleotide
tgcctaatgagccacacttgg

SEQ ID NO: 189 - DNA, 21 bp, synthetic construct
  source 1..21: mol_type = other DNA
  modified_base 1: mod_base = OTHER; note = 2'O-methyl-nucleotide phosphorothioate
  modified_base 2: mod_base = OTHER; note = 2'O-methyl-nucleotide phosphorothioate
  modified_base 3: mod_base = OTHER; note = 2'fluoro-nucleotide
  modified_base 4: mod_base = OTHER; note = 2'O-methyl-nucleotide
  modified_base 5: mod_base = OTHER; note = 2'O-methyl-nucleotide
  modified_base 6: mod_base = OTHER; note = 2'O-methyl-nucleotide
  modified_base 7: mod_base = OTHER; note = 2'fluoro-nucleotide
  modified_base 8: mod_base = OTHER; note = 2'fluoro-nucleotide
  modified_base 9: mod_base = OTHER; note = 2'fluoro-nucleotide
  modified_base 10: mod_base = OTHER; note = 2'O-methyl-nucleotide
  modified_base 11: mod_base = OTHER; note = 2'O-methyl-nucleotide
  modified_base 12: mod_base = OTHER; note = 2'fluoro-nucleotide
  modified_base 13: mod_base = OTHER; note = 2'O-methyl-nucleotide
  modified_base 14: mod_base = OTHER; note = 2'O-methyl-nucleotide
  modified_base 15: mod_base = OTHER; note = 2'O-methyl-nucleotide
  modified_base 16: mod_base = OTHER; note = 2'O-methyl-nucleotide
  modified_base 17: mod_base = OTHER; note = 2'fluoro-nucleotide phosphorothioate
  modified_base 18: mod_base = OTHER; note = 2'O-methyl-nucleotide phosphorothioate
  modified_base 19: mod_base = OTHER; note = 2'O-methyl-nucleotide
  modified_base 21: mod_base = OTHER; note N,N'-((((2R,3R,4R,5R)-4-hydroxy-5-(hydroxymethyl)tetrahydro furan-2,3-diyl)bis(oxy))bis(propane-3,1-diyl))dipalmitamide deoxy-thymidine
  misc_feature 1..19: note = RNA
  misc_feature 20..21: note = DNA
aagtgtggctcattaggcatt

SEQ ID NO: 190 - RNA, 21 nt, synthetic construct
  source 1..21: mol_type = other RNA
  modified_base 1: mod_base = OTHER; note = Vinyl phosphonate 2'O-methyl-nucleotide phosphorothioate
  modified_base 2: mod_base = OTHER; note = 2'fluoro-nucleotide phosphorothioate
  modified_base 3: mod_base = OTHER; note = 2'O-methyl-nucleotide
  modified_base 4: mod_base = OTHER; note = 2'O-methyl-nucleotide
  modified_base 5: mod_base = OTHER; note = 2'O-methyl-nucleotide
  modified_base 6: mod_base = OTHER; note = 2'fluoro-nucleotide
  modified_base 7: mod_base = OTHER; note = Glycol nucleotide
  modified_base 8: mod_base = OTHER; note = 2'O-methyl-nucleotide
  modified_base 9: mod_base = OTHER; note = 2'O-methyl-nucleotide
  modified_base 10: mod_base = OTHER; note = 2'O-methyl-nucleotide
  modified_base 11: mod_base = OTHER; note = 2'O-methyl-nucleotide
  modified_base 12: mod_base = OTHER; note = 2'O-methyl-nucleotide
  modified_base 13: mod_base = OTHER; note = 2'O-methyl-nucleotide
  modified_base 14: mod_base = OTHER; note = 2'fluoro-nucleotide
  modified_base 15: mod_base = OTHER; note = 2'O-methyl-nucleotide
  modified_base 16: mod_base = OTHER; note = 2'fluoro-nucleotide
  modified_base 17: mod_base = OTHER; note = 2'O-methyl-nucleotide
  modified_base 18: mod_base = OTHER; note = 2'O-methyl-nucleotide
  modified_base 19: mod_base = OTHER; note = 2'O-methyl-nucleotide phosphorothioate
  modified_base 20: mod_base = OTHER; note = 2'O-methyl-nucleotide phosphorothioate
  modified_base 21: mod_base = OTHER; note = 2'O-methyl-nucleotide
tgcctaatgagccacacttgg

SEQ ID NO: 191 - DNA, 21 bp, synthetic construct
  source 1..21: mol_type = other DNA
  modified_base 1: mod_base = OTHER; note = 2'O-methyl-nucleotide phosphorothioate
  modified_base 2: mod_base = OTHER; note = 2'O-methyl-nucleotide phosphorothioate
  modified_base 3: mod_base = OTHER; note = 2'fluoro-nucleotide
  modified_base 4: mod_base = OTHER; note = 2'O-methyl-nucleotide
  modified_base 5: mod_base = OTHER; note = 2'O-methyl-nucleotide
  modified_base 6: mod_base = OTHER; note = 2'O-methyl-nucleotide
  modified_base 7: mod_base = OTHER; note = 2'fluoro-nucleotide
  modified_base 8: mod_base = OTHER; note = 2'fluoro-nucleotide
  modified_base 9: mod_base = OTHER; note = 2'fluoro-nucleotide
  modified_base 10: mod_base = OTHER; note = 2'O-methyl-nucleotide
  modified_base 11: mod_base = OTHER; note = 2'O-methyl-nucleotide
  modified_base 12: mod_base = OTHER; note = 2'fluoro-nucleotide
  modified_base 13: mod_base = OTHER; note = 2'O-methyl-nucleotide
  modified_base 14: mod_base = OTHER; note = 2'O-methyl-nucleotide
  modified_base 15: mod_base = OTHER; note = 2'O-methyl-nucleotide
  modified_base 16: mod_base = OTHER; note = 2'O-methyl-nucleotide
  modified_base 17: mod_base = OTHER; note = 2'fluoro-nucleotide phosphorothioate
  modified_base 18: mod_base = OTHER; note = 2'O-methyl-nucleotide phosphorothioate
  modified_base 19: mod_base = OTHER; note = 2'O-methyl-nucleotide
  modified_base 21: mod_base = OTHER; note = Cholesterol-triethylene glycol deoxy-thymidine
  misc_feature 1..19: note = RNA
  misc_feature 20..21: note = DNA
aagtgtggctcattaggcatt

SEQ ID NO: 192 - RNA, 21 nt, synthetic construct
  source 1..21: mol_type = other RNA
  modified_base 1: mod_base = OTHER; note = Vinyl phosphonate 2'O-methyl-nucleotide phosphorothioate
  modified_base 2: mod_base = OTHER; note = 2'fluoro-nucleotide phosphorothioate
  modified_base 3: mod_base = OTHER; note = 2'O-methyl-nucleotide
  modified_base 4: mod_base = OTHER; note = 2'O-methyl-nucleotide
  modified_base 5: mod_base = OTHER; note = 2'O-methyl-nucleotide
  modified_base 6: mod_base = OTHER; note = 2'fluoro-nucleotide
  modified_base 7: mod_base = OTHER; note = 2'O-methyl-nucleotide
  modified_base 8: mod_base = OTHER; note = 2'O-methyl-nucleotide
  modified_base 9: mod_base = OTHER; note = 2'O-methyl-nucleotide
  modified_base 10: mod_base = OTHER; note = 2'O-methyl-nucleotide
  modified_base 11: mod_base = OTHER; note = 2'O-methyl-nucleotide
  modified_base 12: mod_base = OTHER; note = 2'O-methyl-nucleotide
  modified_base 13: mod_base = OTHER; note = 2'O-methyl-nucleotide
  modified_base 14: mod_base = OTHER; note = 2'fluoro-nucleotide
  modified_base 15: mod_base = OTHER; note = 2'O-methyl-nucleotide
  modified_base 16: mod_base = OTHER; note = 2'fluoro-nucleotide
  modified_base 17: mod_base = OTHER; note = 2'O-methyl-nucleotide
  modified_base 18: mod_base = OTHER; note = 2'O-methyl-nucleotide
  modified_base 19: mod_base = OTHER; note = 2'O-methyl-nucleotide phosphorothioate
  modified_base 20: mod_base = OTHER; note = 2'O-methyl-nucleotide phosphorothioate
  modified_base 21: mod_base = OTHER; note = 2'O-methyl-nucleotide
tgcctaatgagccacacttgg

SEQ ID NO: 193 - RNA, 19 nt, synthetic construct
  source 1..19: mol_type = other RNA
  modified_base 1: mod_base = OTHER; note = Cholesterol-triethylene glycol 2'O-methyl-nucleotide phosphorothioate
  modified_base 2: mod_base = OTHER; note = 2'O-methyl-nucleotide phosphorothioate
  modified_base 3: mod_base = OTHER; note = 2'fluoro-nucleotide
  modified_base 4: mod_base = OTHER; note = 2'O-methyl-nucleotide
  modified_base 5: mod_base = OTHER; note = 2'O-methyl-nucleotide
  modified_base 6: mod_base = OTHER; note = 2'O-methyl-nucleotide
  modified_base 7: mod_base = OTHER; note = 2'fluoro-nucleotide
  modified_base 8: mod_base = OTHER; note = 2'fluoro-nucleotide
  modified_base 9: mod_base = OTHER; note = 2'fluoro-nucleotide
  modified_base 10: mod_base = OTHER; note = 2'O-methyl-nucleotide
  modified_base 11: mod_base = OTHER; note = 2'O-methyl-nucleotide
  modified_base 12: mod_base = OTHER; note = 2'fluoro-nucleotide
  modified_base 13: mod_base = OTHER; note = 2'O-methyl-nucleotide
  modified_base 14: mod_base = OTHER; note = 2'O-methyl-nucleotide
  modified_base 15: mod_base = OTHER; note = 2'O-methyl-nucleotide
  modified_base 16: mod_base = OTHER; note = 2'O-methyl-nucleotide
  modified_base 17: mod_base = OTHER; note = 2'fluoro-nucleotide phosphorothioate
  modified_base 18: mod_base = OTHER; note = 2'O-methyl-nucleotide phosphorothioate
  modified_base 19: mod_base = OTHER; note = 2'O-methyl-nucleotide
aagtgtggctcattaggca

SEQ ID NO: 194 - RNA, 21 nt, synthetic construct
  source 1..21: mol_type = other RNA
  modified_base 1: mod_base = OTHER; note = Vinyl phosphonate 2'O-methyl-nucleotide phosphorothioate
  modified_base 2: mod_base = OTHER; note = 2'fluoro-nucleotide phosphorothioate
  modified_base 3: mod_base = OTHER; note = 2'O-methyl-nucleotide
  modified_base 4: mod_base = OTHER; note = 2'O-methyl-nucleotide
  modified_base 5: mod_base = OTHER; note = 2'O-methyl-nucleotide
  modified_base 6: mod_base = OTHER; note = 2'fluoro-nucleotide
  modified_base 7: mod_base = OTHER; note = 2'O-methyl-nucleotide
  modified_base 8: mod_base = OTHER; note = 2'O-methyl-nucleotide
  modified_base 9: mod_base = OTHER; note = 2'O-methyl-nucleotide
  modified_base 10: mod_base = OTHER; note = 2'O-methyl-nucleotide
  modified_base 11: mod_base = OTHER; note = 2'O-methyl-nucleotide
  modified_base 12: mod_base = OTHER; note = 2'O-methyl-nucleotide
  modified_base 13: mod_base = OTHER; note = 2'O-methyl-nucleotide
  modified_base 14: mod_base = OTHER; note = 2'fluoro-nucleotide
  modified_base 15: mod_base = OTHER; note = 2'O-methyl-nucleotide
  modified_base 16: mod_base = OTHER; note = 2'fluoro-nucleotide
  modified_base 17: mod_base = OTHER; note = 2'O-methyl-nucleotide
  modified_base 18: mod_base = OTHER; note = 2'O-methyl-nucleotide
  modified_base 19: mod_base = OTHER; note = 2'O-methyl-nucleotide phosphorothioate
  modified_base 20: mod_base = OTHER; note = 2'O-methyl-nucleotide phosphorothioate
  modified_base 21: mod_base = OTHER; note = 2'O-methyl-nucleotide
tgcctaatgagccacacttgg

SEQ ID NO: 195 - RNA, 19 nt, synthetic construct
  source 1..19: mol_type = other RNA
  modified_base 1: mod_base = OTHER; note = 2'O-methyl-nucleotide phosphorothioate
  modified_base 2: mod_base = OTHER; note = 2'O-methyl-nucleotide phosphorothioate
  modified_base 3: mod_base = OTHER; note = 2'fluoro-nucleotide
  modified_base 4: mod_base = OTHER; note = 2'O-methyl-nucleotide
  modified_base 5: mod_base = OTHER; note = 2'O-methyl-nucleotide
  modified_base 6: mod_base = OTHER; note 1-((2R,3R,4R,5R)-4-hydroxy-5-(hydroxymethyl)-3-(((Z)-octade c-9-en-1-yl)oxy)tetrahydrofuran-2-yl)pyrimidine-2,4(1H,3H)- dione nucleotide
  modified_base 7: mod_base = OTHER; note = 2'fluoro-nucleotide
  modified_base 8: mod_base = OTHER; note = 2'fluoro-nucleotide
  modified_base 9: mod_base = OTHER; note = 2'fluoro-nucleotide
  modified_base 10: mod_base = OTHER; note = 2'O-methyl-nucleotide
  modified_base 11: mod_base = OTHER; note = 2'O-methyl-nucleotide
  modified_base 12: mod_base = OTHER; note = 2'fluoro-nucleotide
  modified_base 13: mod_base = OTHER; note = 2'O-methyl-nucleotide
  modified_base 14: mod_base = OTHER; note = 2'O-methyl-nucleotide
  modified_base 15: mod_base = OTHER; note = 2'O-methyl-nucleotide
  modified_base 16: mod_base = OTHER; note = 2'O-methyl-nucleotide
  modified_base 17: mod_base = OTHER; note = 2'fluoro-nucleotide phosphorothioate
  modified_base 18: mod_base = OTHER; note = 2'O-methyl-nucleotide phosphorothioate
  modified_base 19: mod_base = OTHER; note = 2'O-methyl-nucleotide
aagtgtggctcattaggca

SEQ ID NO: 196 - RNA, 21 nt, synthetic construct
  source 1..21: mol_type = other RNA
  modified_base 1: mod_base = OTHER; note = Vinyl phosphonate 2'O-methyl-nucleotide phosphorothioate
  modified_base 2: mod_base = OTHER; note = 2'fluoro-nucleotide phosphorothioate
  modified_base 3: mod_base = OTHER; note = 2'O-methyl-nucleotide
  modified_base 4: mod_base = OTHER; note = 2'O-methyl-nucleotide
  modified_base 5: mod_base = OTHER; note = 2'O-methyl-nucleotide
  modified_base 6: mod_base = OTHER; note = 2'fluoro-nucleotide
  modified_base 7: mod_base = OTHER; note = 2'O-methyl-nucleotide
  modified_base 8: mod_base = OTHER; note = 2'O-methyl-nucleotide
  modified_base 9: mod_base = OTHER; note = 2'O-methyl-nucleotide
  modified_base 10: mod_base = OTHER; note = 2'O-methyl-nucleotide
  modified_base 11: mod_base = OTHER; note = 2'O-methyl-nucleotide
  modified_base 12: mod_base = OTHER; note = 2'O-methyl-nucleotide
  modified_base 13: mod_base = OTHER; note = 2'O-methyl-nucleotide
  modified_base 14: mod_base = OTHER; note = 2'fluoro-nucleotide
  modified_base 15: mod_base = OTHER; note = 2'O-methyl-nucleotide
  modified_base 16: mod_base = OTHER; note = 2'fluoro-nucleotide
  modified_base 17: mod_base = OTHER; note = 2'O-methyl-nucleotide
  modified_base 18: mod_base = OTHER; note = 2'O-methyl-nucleotide
  modified_base 19: mod_base = OTHER; note = 2'O-methyl-nucleotide phosphorothioate
  modified_base 20: mod_base = OTHER; note = 2'O-methyl-nucleotide phosphorothioate
  modified_base 21: mod_base = OTHER; note = 2'O-methyl-nucleotide
tgcctaatgagccacacttgg

SEQ ID NO: 197 - RNA, 19 nt, synthetic construct
  source 1..19: mol_type = other RNA
  modified_base 1: mod_base = OTHER; note = 2'O-methyl-nucleotide phosphorothioate
  modified_base 2: mod_base = OTHER; note = 2'O-methyl-nucleotide phosphorothioate
  modified_base 3: mod_base = OTHER; note = 2'fluoro-nucleotide
  modified_base 4: mod_base = OTHER; note = 2'O-methyl-nucleotide
  modified_base 5: mod_base = OTHER; note = 2'O-methyl-nucleotide
  modified_base 6: mod_base = OTHER; note N-((2R,3R,4S,5R)-2-(2,4-dioxo-3,4-dihydropyrimidin-1(2H)-yl )-4-hydroxy-5-(hydroxymethyl)tetrahydrofuran-3-yl)palmitami de nucleotide
  modified_base 7: mod_base = OTHER; note = 2'fluoro-nucleotide
  modified_base 8: mod_base = OTHER; note = 2'fluoro-nucleotide
  modified_base 9: mod_base = OTHER; note = 2'fluoro-nucleotide
  modified_base 10: mod_base = OTHER; note = 2'O-methyl-nucleotide
  modified_base 11: mod_base = OTHER; note = 2'O-methyl-nucleotide
  modified_base 12: mod_base = OTHER; note = 2'fluoro-nucleotide
  modified_base 13: mod_base = OTHER; note = 2'O-methyl-nucleotide
  modified_base 14: mod_base = OTHER; note = 2'O-methyl-nucleotide
  modified_base 15: mod_base = OTHER; note = 2'O-methyl-nucleotide
  modified_base 16: mod_base = OTHER; note = 2'O-methyl-nucleotide
  modified_base 17: mod_base = OTHER; note = 2'fluoro-nucleotide phosphorothioate
  modified_base 18: mod_base = OTHER; note = 2'O-methyl-nucleotide phosphorothioate
  modified_base 19: mod_base = OTHER; note = 2'O-methyl-nucleotide
aagtgtggctcattaggca

SEQ ID NO: 198 - RNA, 21 nt, synthetic construct
  source 1..21: mol_type = other RNA
  modified_base 1: mod_base = OTHER; note = Vinyl phosphonate 2'O-methyl-nucleotide phosphorothioate
  modified_base 2: mod_base = OTHER; note = 2'fluoro-nucleotide phosphorothioate
  modified_base 3: mod_base = OTHER; note = 2'O-methyl-nucleotide
  modified_base 4: mod_base = OTHER; note = 2'O-methyl-nucleotide
  modified_base 5: mod_base = OTHER; note = 2'O-methyl-nucleotide
  modified_base 6: mod_base = OTHER; note = 2'fluoro-nucleotide
  modified_base 7: mod_base = OTHER; note = 2'O-methyl-nucleotide
  modified_base 8: mod_base = OTHER; note = 2'O-methyl-nucleotide
  modified_base 9: mod_base = OTHER; note = 2'O-methyl-nucleotide
  modified_base 10: mod_base = OTHER; note = 2'O-methyl-nucleotide
  modified_base 11: mod_base = OTHER; note = 2'O-methyl-nucleotide
  modified_base 12: mod_base = OTHER; note = 2'O-methyl-nucleotide
  modified_base 13: mod_base = OTHER; note = 2'O-methyl-nucleotide
  modified_base 14: mod_base = OTHER; note = 2'fluoro-nucleotide
  modified_base 15: mod_base = OTHER; note = 2'O-methyl-nucleotide
  modified_base 16: mod_base = OTHER; note = 2'fluoro-nucleotide
  modified_base 17: mod_base = OTHER; note = 2'O-methyl-nucleotide
  modified_base 18: mod_base = OTHER; note = 2'O-methyl-nucleotide
  modified_base 19: mod_base = OTHER; note = 2'O-methyl-nucleotide phosphorothioate
  modified_base 20: mod_base = OTHER; note = 2'O-methyl-nucleotide phosphorothioate
  modified_base 21: mod_base = OTHER; note = 2'O-methyl-nucleotide
tgcctaatgagccacacttgg

SEQ ID NO: 199 - RNA, 19 nt, synthetic construct
  source 1..19: mol_type = other RNA
  modified_base 1: mod_base = OTHER; note = 2'O-methyl-nucleotide phosphorothioate
  modified_base 2: mod_base = OTHER; note = 2'O-methyl-nucleotide phosphorothioate
  modified_base 3: mod_base = OTHER; note = 2'fluoro-nucleotide
  modified_base 4: mod_base = OTHER; note = 2'O-methyl-nucleotide
  modified_base 5: mod_base = OTHER; note = 2'O-methyl-nucleotide
  modified_base 6: mod_base = OTHER; note (2R,3R,4R,5R)-2-(2,4-dioxo-3,4-dihydropyrimidin-1(2H)-yl)-4 -hydroxy-5-(hydroxymethyl)tetrahydrofuran-3-yl hexadecylcarbamate nucleotide
  modified_base 7: mod_base = OTHER; note = 2'fluoro-nucleotide
  modified_base 8: mod_base = OTHER; note = 2'fluoro-nucleotide
  modified_base 9: mod_base = OTHER; note = 2'fluoro-nucleotide
  modified_base 10: mod_base = OTHER; note = 2'O-methyl-nucleotide
  modified_base 11: mod_base = OTHER; note = 2'O-methyl-nucleotide
  modified_base 12: mod_base = OTHER; note = 2'fluoro-nucleotide
  modified_base 13: mod_base = OTHER; note = 2'O-methyl-nucleotide
  modified_base 14: mod_base = OTHER; note = 2'O-methyl-nucleotide
  modified_base 15: mod_base = OTHER; note = 2'O-methyl-nucleotide
  modified_base 16: mod_base = OTHER; note = 2'O-methyl-nucleotide
  modified_base 17: mod_base = OTHER; note = 2'fluoro-nucleotide phosphorothioate
  modified_base 18: mod_base = OTHER; note = 2'O-methyl-nucleotide phosphorothioate
  modified_base 19: mod_base = OTHER; note = 2'O-methyl-nucleotide
aagtgtggctcattaggca

SEQ ID NO: 200 - RNA, 21 nt, synthetic construct
  source 1..21: mol_type = other RNA
  modified_base 1: mod_base = OTHER; note = Vinyl phosphonate 2'O-methyl-nucleotide phosphorothioate
  modified_base 2: mod_base = OTHER; note = 2'fluoro-nucleotide phosphorothioate
  modified_base 3: mod_base = OTHER; note = 2'O-methyl-nucleotide
  modified_base 4: mod_base = OTHER; note = 2'O-methyl-nucleotide
  modified_base 5: mod_base = OTHER; note = 2'O-methyl-nucleotide
  modified_base 6: mod_base = OTHER; note = 2'fluoro-nucleotide
  modified_base 7: mod_base = OTHER; note = 2'O-methyl-nucleotide
  modified_base 8: mod_base = OTHER; note = 2'O-methyl-nucleotide
  modified_base 9: mod_base = OTHER; note = 2'O-methyl-nucleotide
  modified_base 10: mod_base = OTHER; note = 2'O-methyl-nucleotide
  modified_base 11: mod_base = OTHER; note = 2'O-methyl-nucleotide
  modified_base 12: mod_base = OTHER; note = 2'O-methyl-nucleotide
  modified_base 13: mod_base = OTHER; note = 2'O-methyl-nucleotide
  modified_base 14: mod_base = OTHER; note = 2'fluoro-nucleotide
  modified_base 15: mod_base = OTHER; note = 2'O-methyl-nucleotide
  modified_base 16: mod_base = OTHER; note = 2'fluoro-nucleotide
  modified_base 17: mod_base = OTHER; note = 2'O-methyl-nucleotide
  modified_base 18: mod_base = OTHER; note = 2'O-methyl-nucleotide
  modified_base 19: mod_base = OTHER; note = 2'O-methyl-nucleotide phosphorothioate
  modified_base 20: mod_base = OTHER; note = 2'O-methyl-nucleotide phosphorothioate
  modified_base 21: mod_base = OTHER; note = 2'O-methyl-nucleotide
tgcctaatgagccacacttgg

SEQ ID NO: 201 - RNA, 19 nt, synthetic construct
  source 1..19: mol_type = other RNA
  modified_base 1: mod_base = OTHER; note = 2'O-methyl-nucleotide phosphorothioate
  modified_base 2: mod_base = OTHER; note = 2'O-methyl-nucleotide phosphorothioate
  modified_base 3: mod_base = OTHER; note = 2'fluoro-nucleotide
  modified_base 4: mod_base = OTHER; note = 2'O-methyl-nucleotide
  modified_base 5: mod_base = OTHER; note = 2'O-methyl-nucleotide
  modified_base 6: mod_base = OTHER; note = Hexadecyl ((2R,3R,4S,5R)-2-(2,4-dioxo-3,4-dihydropyrimidin-1(2H)-yl)- 4-hydroxy-5-(hydroxymethyl)tetrahydrofuran-3-yl)carbamate nucleotide
  modified_base 7: mod_base = OTHER; note = 2'fluoro-nucleotide
  modified_base 8: mod_base = OTHER; note = 2'fluoro-nucleotide
  modified_base 9: mod_base = OTHER; note = 2'fluoro-nucleotide
  modified_base 10: mod_base = OTHER; note = 2'O-methyl-nucleotide
  modified_base 11: mod_base = OTHER; note = 2'O-methyl-nucleotide
  modified_base 12: mod_base = OTHER; note = 2'fluoro-nucleotide
  modified_base 13: mod_base = OTHER; note = 2'O-methyl-nucleotide
  modified_base 14: mod_base = OTHER; note = 2'O-methyl-nucleotide
  modified_base 15: mod_base = OTHER; note = 2'O-methyl-nucleotide
  modified_base 16: mod_base = OTHER; note = 2'O-methyl-nucleotide
  modified_base 17: mod_base = OTHER; note = 2'fluoro-nucleotide phosphorothioate
  modified_base 18: mod_base = OTHER; note = 2'O-methyl-nucleotide phosphorothioate
  modified_base 19: mod_base = OTHER; note = 2'O-methyl-nucleotide
aagtgtggctcattaggca

SEQ ID NO: 202 - RNA, 21 nt, synthetic construct
  source 1..21: mol_type = other RNA
  modified_base 1: mod_base = OTHER; note = Vinyl phosphonate 2'O-methyl-nucleotide phosphorothioate
  modified_base 2: mod_base = OTHER; note = 2'fluoro-nucleotide phosphorothioate
  modified_base 3: mod_base = OTHER; note = 2'O-methyl-nucleotide
  modified_base 4: mod_base = OTHER; note = 2'O-methyl-nucleotide
  modified_base 5: mod_base = OTHER; note = 2'O-methyl-nucleotide
  modified_base 6: mod_base = OTHER; note = 2'fluoro-nucleotide
  modified_base 7: mod_base = OTHER; note = 2'O-methyl-nucleotide
  modified_base 8: mod_base = OTHER; note = 2'O-methyl-nucleotide
  modified_base 9: mod_base = OTHER; note = 2'O-methyl-nucleotide
  modified_base 10: mod_base = OTHER; note = 2'O-methyl-nucleotide
  modified_base 11: mod_base = OTHER; note = 2'O-methyl-nucleotide
  modified_base 12: mod_base = OTHER; note = 2'O-methyl-nucleotide
  modified_base 13: mod_base = OTHER; note = 2'O-methyl-nucleotide
  modified_base 14: mod_base = OTHER; note = 2'fluoro-nucleotide
  modified_base 15: mod_base = OTHER; note = 2'O-methyl-nucleotide
  modified_base 16: mod_base = OTHER; note = 2'fluoro-nucleotide
  modified_base 17: mod_base = OTHER; note = 2'O-methyl-nucleotide
  modified_base 18: mod_base = OTHER; note = 2'O-methyl-nucleotide
  modified_base 19: mod_base = OTHER; note = 2'O-methyl-nucleotide phosphorothioate
  modified_base 20: mod_base = OTHER; note = 2'O-methyl-nucleotide phosphorothioate
  modified_base 21: mod_base = OTHER; note = 2'O-methyl-nucleotide
tgcctaatgagccacacttgg

SEQ ID NO: 203 - RNA, 19 nt, synthetic construct
  source 1..19: mol_type = other RNA
  modified_base 1: mod_base = OTHER; note = 2'O-methyl-nucleotide phosphorothioate
  modified_base 2: mod_base = OTHER; note = 2'O-methyl-nucleotide phosphorothioate
  modified_base 3: mod_base = OTHER; note = 2'fluoro-nucleotide
  modified_base 4: mod_base = OTHER; note = 2'O-methyl-nucleotide
  modified_base 5: mod_base = OTHER; note = 2'O-methyl-nucleotide
  modified_base 6: mod_base = OTHER; note 3-(((2R,3R,4R,5R)-2-(2,4-dioxo-3,4-dihydropyrimidin-1(2H)-y l)-4-hydroxy-5-(hydroxymethyl)tetrahydrofuran-3-yl)oxy)-N-h exadecylpropanamide nucleotide
  modified_base 7: mod_base = OTHER; note = 2'fluoro-nucleotide
  modified_base 8: mod_base = OTHER; note = 2'fluoro-nucleotide
  modified_base 9: mod_base = OTHER; note = 2'fluoro-nucleotide
  modified_base 10: mod_base = OTHER; note = 2'O-methyl-nucleotide
  modified_base 11: mod_base = OTHER; note = 2'O-methyl-nucleotide
  modified_base 12: mod_base = OTHER; note = 2'fluoro-nucleotide
  modified_base 13: mod_base = OTHER; note = 2'O-methyl-nucleotide
  modified_base 14: mod_base = OTHER; note = 2'O-methyl-nucleotide
  modified_base 15: mod_base = OTHER; note = 2'O-methyl-nucleotide
  modified_base 16: mod_base = OTHER; note = 2'O-methyl-nucleotide
  modified_base 17: mod_base = OTHER; note = 2'fluoro-nucleotide phosphorothioate
  modified_base 18: mod_base = OTHER; note = 2'O-methyl-nucleotide phosphorothioate
  modified_base 19: mod_base = OTHER; note = 2'O-methyl-nucleotide
aagtgtggctcattaggca

SEQ ID NO: 204 - RNA, 21 nt, synthetic construct
  source 1..21: mol_type = other RNA
  modified_base 1: mod_base = OTHER; note = Vinyl phosphonate 2'O-methyl-nucleotide phosphorothioate
  modified_base 2: mod_base = OTHER; note = 2'fluoro-nucleotide phosphorothioate
  modified_base 3: mod_base = OTHER; note = 2'O-methyl-nucleotide
  modified_base 4: mod_base = OTHER; note = 2'O-methyl-nucleotide
  modified_base 5: mod_base = OTHER; note = 2'O-methyl-nucleotide
  modified_base 6: mod_base = OTHER; note = 2'fluoro-nucleotide
  modified_base 7: mod_base = OTHER; note = 2'O-methyl-nucleotide
  modified_base 8: mod_base = OTHER; note = 2'O-methyl-nucleotide
  modified_base 9: mod_base = OTHER; note = 2'O-methyl-nucleotide
  modified_base 10: mod_base = OTHER; note = 2'O-methyl-nucleotide
  modified_base 11: mod_base = OTHER; note = 2'O-methyl-nucleotide
  modified_base 12: mod_base = OTHER; note = 2'O-methyl-nucleotide
  modified_base 13: mod_base = OTHER; note = 2'O-methyl-nucleotide
  modified_base 14: mod_base = OTHER; note = 2'fluoro-nucleotide
  modified_base 15: mod_base = OTHER; note = 2'O-methyl-nucleotide
  modified_base 16: mod_base = OTHER; note = 2'fluoro-nucleotide
  modified_base 17: mod_base = OTHER; note = 2'O-methyl-nucleotide
  modified_base 18: mod_base = OTHER; note = 2'O-methyl-nucleotide
  modified_base 19: mod_base = OTHER; note = 2'O-methyl-nucleotide phosphorothioate
  modified_base 20: mod_base = OTHER; note = 2'O-methyl-nucleotide phosphorothioate
  modified_base 21: mod_base = OTHER; note = 2'O-methyl-nucleotide
tgcctaatgagccacacttgg

SEQ ID NO: 205 - RNA, 19 nt, synthetic construct
  source 1..19: mol_type = other RNA
  modified_base 1: mod_base = OTHER; note = 2'O-methyl-nucleotide phosphorothioate
  modified_base 2: mod_base = OTHER; note = 2'O-methyl-nucleotide phosphorothioate
  modified_base 3: mod_base = OTHER; note = 2'fluoro-nucleotide
  modified_base 4: mod_base = OTHER; note = 2'O-methyl-nucleotide
  modified_base 5: mod_base = OTHER; note = 2'O-methyl-nucleotide
  modified_base 6: mod_base = OTHER; note 1-((2R,3R,4R,5R)-3-(2-(hexadecyloxy)ethoxy)-4-hydroxy-5-(hy droxymethyl)tetrahydrofuran-2-yl)pyrimidine-2,4(1H,3H)-dion e nucleotide
  modified_base 7: mod_base = OTHER; note = 2'fluoro-nucleotide
  modified_base 8: mod_base = OTHER; note = 2'fluoro-nucleotide
  modified_base 9: mod_base = OTHER; note = 2'fluoro-nucleotide
  modified_base 10: mod_base = OTHER; note = 2'O-methyl-nucleotide
  modified_base 11: mod_base = OTHER; note = 2'O-methyl-nucleotide
  modified_base 12: mod_base = OTHER; note = 2'fluoro-nucleotide
  modified_base 13: mod_base = OTHER; note = 2'O-methyl-nucleotide
  modified_base 14: mod_base = OTHER; note = 2'O-methyl-nucleotide
  modified_base 15: mod_base = OTHER; note = 2'O-methyl-nucleotide
  modified_base 16: mod_base = OTHER; note = 2'O-methyl-nucleotide
  modified_base 17: mod_base = OTHER; note = 2'fluoro-nucleotide phosphorothioate
  modified_base 18: mod_base = OTHER; note = 2'O-methyl-nucleotide phosphorothioate
  modified_base 19: mod_base = OTHER; note = 2'O-methyl-nucleotide
aagtgtggctcattaggca

SEQ ID NO: 206 - RNA, 21 nt, synthetic construct
  source 1..21: mol_type = other RNA
  modified_base 1: mod_base = OTHER; note = Vinyl phosphonate 2'O-methyl-nucleotide phosphorothioate
  modified_base 2: mod_base = OTHER; note = 2'fluoro-nucleotide phosphorothioate
  modified_base 3: mod_base = OTHER; note = 2'O-methyl-nucleotide
  modified_base 4: mod_base = OTHER; note = 2'O-methyl-nucleotide
  modified_base 5: mod_base = OTHER; note = 2'O-methyl-nucleotide
  modified_base 6: mod_base = OTHER; note = 2'fluoro-nucleotide
  modified_base 7: mod_base = OTHER; note = 2'O-methyl-nucleotide
  modified_base 8: mod_base = OTHER; note = 2'O-methyl-nucleotide
  modified_base 9: mod_base = OTHER; note = 2'O-methyl-nucleotide
  modified_base 10: mod_base = OTHER; note = 2'O-methyl-nucleotide
  modified_base 11: mod_base = OTHER; note = 2'O-methyl-nucleotide
  modified_base 12: mod_base = OTHER; note = 2'O-methyl-nucleotide
  modified_base 13: mod_base = OTHER; note = 2'O-methyl-nucleotide
  modified_base 14: mod_base = OTHER; note = 2'fluoro-nucleotide
  modified_base 15: mod_base = OTHER; note = 2'O-methyl-nucleotide
  modified_base 16: mod_base = OTHER; note = 2'fluoro-nucleotide
  modified_base 17: mod_base = OTHER; note = 2'O-methyl-nucleotide
  modified_base 18: mod_base = OTHER; note = 2'O-methyl-nucleotide
  modified_base 19: mod_base = OTHER; note = 2'O-methyl-nucleotide phosphorothioate
  modified_base 20: mod_base = OTHER; note = 2'O-methyl-nucleotide phosphorothioate
  modified_base 21: mod_base = OTHER; note = 2'O-methyl-nucleotide
tgcctaatgagccacacttgg

SEQ ID NO: 207 - DNA, 21 bp, synthetic construct
  source 1..21: mol_type = other DNA
  modified_base 1: mod_base = OTHER; note = 2'O-methyl-nucleotide phosphorothioate
  modified_base 2: mod_base = OTHER; note = 2'O-methyl-nucleotide phosphorothioate
  modified_base 3: mod_base = OTHER; note = 2'fluoro-nucleotide
  modified_base 4: mod_base = OTHER; note = 2'O-methyl-nucleotide
  modified_base 5: mod_base = OTHER; note = 2'O-methyl-nucleotide
  modified_base 6: mod_base = OTHER; note = 2'O-methyl-nucleotide
  modified_base 7: mod_base = OTHER; note = 2'fluoro-nucleotide
  modified_base 8: mod_base = OTHER; note = 2'fluoro-nucleotide
  modified_base 9: mod_base = OTHER; note = 2'fluoro-nucleotide
  modified_base 10: mod_base = OTHER; note = 2'O-methyl-nucleotide
  modified_base 11: mod_base = OTHER; note = 2'O-methyl-nucleotide
  modified_base 12: mod_base = OTHER; note = 2'fluoro-nucleotide
  modified_base 13: mod_base = OTHER; note = 2'O-methyl-nucleotide
  modified_base 14: mod_base = OTHER; note = 2'O-methyl-nucleotide
  modified_base 15: mod_base = OTHER; note = 2'O-methyl-nucleotide
  modified_base 16: mod_base = OTHER; note = 2'O-methyl-nucleotide
  modified_base 17: mod_base = OTHER; note = 2'fluoro-nucleotide phosphorothioate
  modified_base 18: mod_base = OTHER; note = 2'O-methyl-nucleotide phosphorothioate
  modified_base 19: mod_base = OTHER; note = 2'O-methyl-nucleotide
  modified_base 21: mod_base = OTHER; note (2R,3R,4R,5R)-5-(heptadecyloxy)-4-(hexadecyloxy)-2-(hydroxy methyl)tetrahydrofuran-3-ol deoxy-thymidine
  misc_feature 1..19: note = RNA
  misc_feature 20..21: note = DNA
aagtgtggctcattaggcatt

SEQ ID NO: 208 - RNA, 21 nt, synthetic construct
  source 1..21: mol_type = other RNA
  modified_base 1: mod_base = OTHER; note = Vinyl phosphonate 2'O-methyl-nucleotide phosphorothioate
  modified_base 2: mod_base = OTHER; note = 2'fluoro-nucleotide phosphorothioate
  modified_base 3: mod_base = OTHER; note = 2'O-methyl-nucleotide
  modified_base 4: mod_base = OTHER; note = 2'O-methyl-nucleotide
  modified_base 5: mod_base = OTHER; note = 2'O-methyl-nucleotide
  modified_base 6: mod_base = OTHER; note = 2'fluoro-nucleotide
  modified_base 7: mod_base = OTHER; note = 2'O-methyl-nucleotide
  modified_base 8: mod_base = OTHER; note = 2'O-methyl-nucleotide
  modified_base 9: mod_base = OTHER; note = 2'O-methyl-nucleotide
  modified_base 10: mod_base = OTHER; note = 2'O-methyl-nucleotide
  modified_base 11: mod_base = OTHER; note = 2'O-methyl-nucleotide
  modified_base 12: mod_base = OTHER; note = 2'O-methyl-nucleotide
  modified_base 13: mod_base = OTHER; note = 2'O-methyl-nucleotide
  modified_base 14: mod_base = OTHER; note = 2'fluoro-nucleotide
  modified_base 15: mod_base = OTHER; note = 2'O-methyl-nucleotide
  modified_base 16: mod_base = OTHER; note = 2'fluoro-nucleotide
  modified_base 17: mod_base = OTHER; note = 2'O-methyl-nucleotide
  modified_base 18: mod_base = OTHER; note = 2'O-methyl-nucleotide
  modified_base 19: mod_base = OTHER; note = 2'O-methyl-nucleotide phosphorothioate
  modified_base 20: mod_base = OTHER; note = 2'O-methyl-nucleotide phosphorothioate
  modified_base 21: mod_base = OTHER; note = 2'O-methyl-nucleotide
tgcctaatgagccacacttgg

SEQ ID NO: 209 - RNA, 19 nt, synthetic construct
  source 1..19: mol_type = other RNA
  modified_base 1: mod_base = OTHER; note = 2'O-methyl-nucleotide phosphorothioate
  modified_base 2: mod_base = OTHER; note = 2'O-methyl-nucleotide phosphorothioate
  modified_base 3: mod_base = OTHER; note = 2'fluoro-nucleotide
  modified_base 4: mod_base = OTHER; note = 2'O-methyl-nucleotide
  modified_base 5: mod_base = OTHER; note = 2'O-methyl-nucleotide
  modified_base 6: mod_base = OTHER; note = 2'O-methyl-nucleotide
  modified_base 7: mod_base = OTHER; note = 2'fluoro-nucleotide
  modified_base 8: mod_base = OTHER; note = 2'fluoro-nucleotide
  modified_base 9: mod_base = OTHER; note = 2'fluoro-nucleotide
  modified_base 10: mod_base = OTHER; note = 2'O-methyl-nucleotide
  modified_base 11: mod_base = OTHER; note = 2'O-methyl-nucleotide
  modified_base 12: mod_base = OTHER; note = 2'fluoro-nucleotide
  modified_base 13: mod_base = OTHER; note = 2'O-methyl-nucleotide
  modified_base 14: mod_base = OTHER; note = 2'O-methyl-nucleotide
  modified_base 15: mod_base = OTHER; note = 2'O-methyl-nucleotide
  modified_base 16: mod_base = OTHER; note = 2'O-methyl-nucleotide
  modified_base 17: mod_base = OTHER; note = 2'fluoro-nucleotide phosphorothioate
  modified_base 18: mod_base = OTHER; note = 2'O-methyl-nucleotide phosphorothioate
  modified_base 19: mod_base = OTHER; note 2'O-methyl-(2R,3R,4R,5R)-4-(hexadecyloxy)-2-(hydroxymethyl) -5-methoxytetrahydrofuran-3-ol nucleotide
aagtgtggctcattaggca

SEQ ID NO: 210 - RNA, 21 nt, synthetic construct
  source 1..21: mol_type = other RNA
  modified_base 1: mod_base = OTHER; note = Vinyl phosphonate 2'O-methyl-nucleotide phosphorothioate
  modified_base 2: mod_base = OTHER; note = 2'fluoro-nucleotide phosphorothioate
  modified_base 3: mod_base = OTHER; note = 2'O-methyl-nucleotide
  modified_base 4: mod_base = OTHER; note = 2'O-methyl-nucleotide
  modified_base 5: mod_base = OTHER; note = 2'O-methyl-nucleotide
  modified_base 6: mod_base = OTHER; note = 2'fluoro-nucleotide
  modified_base 7: mod_base = OTHER; note = 2'O-methyl-nucleotide
  modified_base 8: mod_base = OTHER; note = 2'O-methyl-nucleotide
  modified_base 9: mod_base = OTHER; note = 2'O-methyl-nucleotide
  modified_base 10: mod_base = OTHER; note = 2'O-methyl-nucleotide
  modified_base 11: mod_base = OTHER; note = 2'O-methyl-nucleotide
  modified_base 12: mod_base = OTHER; note = 2'O-methyl-nucleotide
  modified_base 13: mod_base = OTHER; note = 2'O-methyl-nucleotide
  modified_base 14: mod_base = OTHER; note = 2'fluoro-nucleotide
  modified_base 15: mod_base = OTHER; note = 2'O-methyl-nucleotide
  modified_base 16: mod_base = OTHER; note = 2'fluoro-nucleotide
  modified_base 17: mod_base = OTHER; note = 2'O-methyl-nucleotide
  modified_base 18: mod_base = OTHER; note = 2'O-methyl-nucleotide
  modified_base 19: mod_base = OTHER; note = 2'O-methyl-nucleotide phosphorothioate
  modified_base 20: mod_base = OTHER; note = 2'O-methyl-nucleotide phosphorothioate
  modified_base 21: mod_base = OTHER; note = 2'O-methyl-nucleotide
tgcctaatgagccacacttgg

SEQ ID NO: 211 - RNA, 19 nt, synthetic construct
  source 1..19: mol_type = other RNA
  modified_base 1: mod_base = OTHER; note 2'O-methyl-(2R,3R,4R,5R)-4-(hexadecyloxy)-2-(hydroxymethyl) -5-methoxytetrahydrofuran-3-ol nucleotide phosphorothioate
  modified_base 2: mod_base = OTHER; note = 2'O-methyl-nucleotide phosphorothioate
  modified_base 3: mod_base = OTHER; note = 2'fluoro-nucleotide
  modified_base 4: mod_base = OTHER; note = 2'O-methyl-nucleotide
  modified_base 5: mod_base = OTHER; note = 2'O-methyl-nucleotide
  modified_base 6: mod_base = OTHER; note = 2'O-methyl-nucleotide
  modified_base 7: mod_base = OTHER; note = 2'fluoro-nucleotide
  modified_base 8: mod_base = OTHER; note = 2'fluoro-nucleotide
  modified_base 9: mod_base = OTHER; note = 2'fluoro-nucleotide
  modified_base 10: mod_base = OTHER; note = 2'O-methyl-nucleotide
  modified_base 11: mod_base = OTHER; note = 2'O-methyl-nucleotide
  modified_base 12: mod_base = OTHER; note = 2'fluoro-nucleotide
  modified_base 13: mod_base = OTHER; note = 2'O-methyl-nucleotide
  modified_base 14: mod_base = OTHER; note = 2'O-methyl-nucleotide
  modified_base 15: mod_base = OTHER; note = 2'O-methyl-nucleotide
  modified_base 16: mod_base = OTHER; note = 2'O-methyl-nucleotide
  modified_base 17: mod_base = OTHER; note = 2'fluoro-nucleotide phosphorothioate
  modified_base 18: mod_base = OTHER; note = 2'O-methyl-nucleotide phosphorothioate
  modified_base 19: mod_base = OTHER; note = 2'O-methyl-nucleotide
aagtgtggctcattaggca

SEQ ID NO: 212 - RNA, 21 nt, synthetic construct
  source 1..21: mol_type = other RNA
  modified_base 1: mod_base = OTHER; note = Vinyl phosphonate 2'O-methyl-nucleotide phosphorothioate
  modified_base 2: mod_base = OTHER; note = 2'fluoro-nucleotide phosphorothioate
  modified_base 3: mod_base = OTHER; note = 2'O-methyl-nucleotide
  modified_base 4: mod_base = OTHER; note = 2'O-methyl-nucleotide
  modified_base 5: mod_base = OTHER; note = 2'O-methyl-nucleotide
  modified_base 6: mod_base = OTHER; note = 2'fluoro-nucleotide
  modified_base 7: mod_base = OTHER; note = 2'O-methyl-nucleotide
  modified_base 8: mod_base = OTHER; note = 2'O-methyl-nucleotide
  modified_base 9: mod_base = OTHER; note = 2'O-methyl-nucleotide
  modified_base 10: mod_base = OTHER; note = 2'O-methyl-nucleotide
  modified_base 11: mod_base = OTHER; note = 2'O-methyl-nucleotide
  modified_base 12: mod_base = OTHER; note = 2'O-methyl-nucleotide
  modified_base 13: mod_base = OTHER; note = 2'O-methyl-nucleotide
  modified_base 14: mod_base = OTHER; note = 2'fluoro-nucleotide
  modified_base 15: mod_base = OTHER; note = 2'O-methyl-nucleotide
  modified_base 16: mod_base = OTHER; note = 2'fluoro-nucleotide
  modified_base 17: mod_base = OTHER; note = 2'O-methyl-nucleotide
  modified_base 18: mod_base = OTHER; note = 2'O-methyl-nucleotide
  modified_base 19: mod_base = OTHER; note = 2'O-methyl-nucleotide phosphorothioate
  modified_base 20: mod_base = OTHER; note = 2'O-methyl-nucleotide phosphorothioate
  modified_base 21: mod_base = OTHER; note = 2'O-methyl-nucleotide
tgcctaatgagccacacttgg

SEQ ID NO: 213 - RNA, 19 nt, synthetic construct
  source 1..19: mol_type = other RNA
  modified_base 1: mod_base = OTHER; note = 2'O-methyl-nucleotide phosphorothioate
  modified_base 2: mod_base = OTHER; note = 2'O-methyl-nucleotide phosphorothioate
  modified_base 3: mod_base = OTHER; note = 2'fluoro-nucleotide
  modified_base 4: mod_base = OTHER; note = 2'O-methyl-nucleotide
  modified_base 5: mod_base = OTHER; note = 2'O-methyl-nucleotide
  modified_base 6: mod_base = OTHER; note = 2'O-methyl-nucleotide
  modified_base 7: mod_base = OTHER; note = 2'fluoro-nucleotide
  modified_base 8: mod_base = OTHER; note = 2'fluoro-nucleotide
  modified_base 9: mod_base = OTHER; note = 2'fluoro-nucleotide
  modified_base 10: mod_base = OTHER; note = 2'O-methyl-nucleotide
  modified_base 11: mod_base = OTHER; note = 2'O-methyl-nucleotide
  modified_base 12: mod_base = OTHER; note = 2'fluoro-nucleotide
  modified_base 13: mod_base = OTHER; note = 2'O-methyl-nucleotide
  modified_base 14: mod_base = OTHER; note = 2'O-methyl-nucleotide
  modified_base 15: mod_base = OTHER; note = 2'O-methyl-nucleotide
  modified_base 16: mod_base = OTHER; note = 2'O-methyl-nucleotide
  modified_base 17: mod_base = OTHER; note = 2'fluoro-nucleotide phosphorothioate
  modified_base 18: mod_base = OTHER; note = 2'O-methyl-nucleotide phosphorothioate
  modified_base 19: mod_base = OTHER; note 2'O-methyl-(2R,3R,4R,5R)-5-(heptadecyloxy)-2-(hydroxymethyl )-4-(2-methoxyethoxy)tetrahydrofuran-3-ol nucleotide
aagtgtggctcattaggca

SEQ ID NO: 214 - RNA, 21 nt, synthetic construct
  source 1..21: mol_type = other RNA
  modified_base 1: mod_base = OTHER; note = Vinyl phosphonate 2'O-methyl-nucleotide phosphorothioate
  modified_base 2: mod_base = OTHER; note = 2'fluoro-nucleotide phosphorothioate
  modified_base 3: mod_base = OTHER; note = 2'O-methyl-nucleotide
  modified_base 4: mod_base = OTHER; note = 2'O-methyl-nucleotide
  modified_base 5: mod_base = OTHER; note = 2'O-methyl-nucleotide
  modified_base 6: mod_base = OTHER; note = 2'fluoro-nucleotide
  modified_base 7: mod_base = OTHER; note = 2'O-methyl-nucleotide
  modified_base 8: mod_base = OTHER; note = 2'O-methyl-nucleotide
  modified_base 9: mod_base = OTHER; note = 2'O-methyl-nucleotide
  modified_base 10: mod_base = OTHER; note = 2'O-methyl-nucleotide
  modified_base 11: mod_base = OTHER; note = 2'O-methyl-nucleotide
  modified_base 12: mod_base = OTHER; note = 2'O-methyl-nucleotide
  modified_base 13: mod_base = OTHER; note = 2'O-methyl-nucleotide
  modified_base 14: mod_base = OTHER; note = 2'fluoro-nucleotide
  modified_base 15: mod_base = OTHER; note = 2'O-methyl-nucleotide
  modified_base 16: mod_base = OTHER; note = 2'fluoro-nucleotide
  modified_base 17: mod_base = OTHER; note = 2'O-methyl-nucleotide
  modified_base 18: mod_base = OTHER; note = 2'O-methyl-nucleotide
  modified_base 19: mod_base = OTHER; note = 2'O-methyl-nucleotide phosphorothioate
  modified_base 20: mod_base = OTHER; note = 2'O-methyl-nucleotide phosphorothioate
  modified_base 21: mod_base = OTHER; note = 2'O-methyl-nucleotide
tgcctaatgagccacacttgg

SEQ ID NO: 215 - RNA, 19 nt, synthetic construct
  source 1..19: mol_type = other RNA
  modified_base 1: mod_base = OTHER; note 2'O-methyl-(2R,3R,4R,5R)-4-(hexadecyloxy)-2-(hydroxymethyl) -5-methoxytetrahydrofuran-3-ol nucleotide phosphorothioate
  modified_base 2: mod_base = OTHER; note = 2'O-methyl-nucleotide phosphorothioate
  modified_base 3: mod_base = OTHER; note = 2'fluoro-nucleotide
  modified_base 4: mod_base = OTHER; note = 2'O-methyl-nucleotide
  modified_base 5: mod_base = OTHER; note = 2'O-methyl-nucleotide
  modified_base 6: mod_base = OTHER; note = 2'O-methyl-nucleotide
  modified_base 7: mod_base = OTHER; note = 2'fluoro-nucleotide
  modified_base 8: mod_base = OTHER; note = 2'fluoro-nucleotide
  modified_base 9: mod_base = OTHER; note = 2'fluoro-nucleotide
  modified_base 10: mod_base = OTHER; note = 2'O-methyl-nucleotide
  modified_base 11: mod_base = OTHER; note = 2'O-methyl-nucleotide
  modified_base 12: mod_base = OTHER; note = 2'fluoro-nucleotide
  modified_base 13: mod_base = OTHER; note = 2'O-methyl-nucleotide
  modified_base 14: mod_base = OTHER; note = 2'O-methyl-nucleotide
  modified_base 15: mod_base = OTHER; note = 2'O-methyl-nucleotide
  modified_base 16: mod_base = OTHER; note = 2'O-methyl-nucleotide
  modified_base 17: mod_base = OTHER; note = 2'fluoro-nucleotide phosphorothioate
  modified_base 18: mod_base = OTHER; note = 2'O-methyl-nucleotide phosphorothioate
  modified_base 19: mod_base = OTHER; note 2'O-methyl-(2R,3R,4R,5R)-4-(hexadecyloxy)-2-(hydroxymethyl) -5-methoxytetrahydrofuran-3-ol nucleotide
aagtgtggctcattaggca

SEQ ID NO: 216 - RNA, 21 nt, synthetic construct
  source 1..21: mol_type = other RNA
  modified_base 1: mod_base = OTHER; note = Vinyl phosphonate 2'O-methyl-nucleotide phosphorothioate
  modified_base 2: mod_base = OTHER; note = 2'fluoro-nucleotide phosphorothioate
  modified_base 3: mod_base = OTHER; note = 2'O-methyl-nucleotide
  modified_base 4: mod_base = OTHER; note = 2'O-methyl-nucleotide
  modified_base 5: mod_base = OTHER; note = 2'O-methyl-nucleotide
  modified_base 6: mod_base = OTHER; note = 2'fluoro-nucleotide
  modified_base 7: mod_base = OTHER; note = 2'O-methyl-nucleotide
  modified_base 8: mod_base = OTHER; note = 2'O-methyl-nucleotide
  modified_base 9: mod_base = OTHER; note = 2'O-methyl-nucleotide
  modified_base 10: mod_base = OTHER; note = 2'O-methyl-nucleotide
  modified_base 11: mod_base = OTHER; note = 2'O-methyl-nucleotide
  modified_base 12: mod_base = OTHER; note = 2'O-methyl-nucleotide
  modified_base 13: mod_base = OTHER; note = 2'O-methyl-nucleotide
  modified_base 14: mod_base = OTHER; note = 2'fluoro-nucleotide
  modified_base 15: mod_base = OTHER; note = 2'O-methyl-nucleotide
  modified_base 16: mod_base = OTHER; note = 2'fluoro-nucleotide
  modified_base 17: mod_base = OTHER; note = 2'O-methyl-nucleotide
  modified_base 18: mod_base = OTHER; note = 2'O-methyl-nucleotide
  modified_base 19: mod_base = OTHER; note = 2'O-methyl-nucleotide phosphorothioate
  modified_base 20: mod_base = OTHER; note = 2'O-methyl-nucleotide phosphorothioate
  modified_base 21: mod_base = OTHER; note = 2'O-methyl-nucleotide
tgcctaatgagccacacttgg

SEQ ID NO: 217 - RNA, 19 nt, synthetic construct
  source 1..19: mol_type = other RNA
  modified_base 1: mod_base = OTHER; note 2'O-methyl-(2R,3R,4R,5R)-5-(heptadecyloxy)-2-(hydroxymethyl )-4-(2-methoxyethoxy)tetrahydrofuran-3-ol nucleotide phosphorothioate
  modified_base 2: mod_base = OTHER; note = 2'O-methyl-nucleotide phosphorothioate
  modified_base 3: mod_base = OTHER; note = 2'fluoro-nucleotide
  modified_base 4: mod_base = OTHER; note = 2'O-methyl-nucleotide
  modified_base 5: mod_base = OTHER; note = 2'O-methyl-nucleotide
  modified_base 6: mod_base = OTHER; note = 2'O-methyl-nucleotide
  modified_base 7: mod_base = OTHER; note = 2'fluoro-nucleotide
  modified_base 8: mod_base = OTHER; note = 2'fluoro-nucleotide
  modified_base 9: mod_base = OTHER; note = 2'fluoro-nucleotide
  modified_base 10: mod_base = OTHER; note = 2'O-methyl-nucleotide
  modified_base 11: mod_base = OTHER; note = 2'O-methyl-nucleotide
  modified_base 12: mod_base = OTHER; note = 2'fluoro-nucleotide
  modified_base 13: mod_base = OTHER; note = 2'O-methyl-nucleotide
  modified_base 14: mod_base = OTHER; note = 2'O-methyl-nucleotide
  modified_base 15: mod_base = OTHER; note = 2'O-methyl-nucleotide
  modified_base 16: mod_base = OTHER; note = 2'O-methyl-nucleotide
  modified_base 17: mod_base = OTHER; note = 2'fluoro-nucleotide phosphorothioate
  modified_base 18: mod_base = OTHER; note = 2'O-methyl-nucleotide phosphorothioate
  modified_base 19: mod_base = OTHER; note 2'O-methyl-(2R,3R,4R,5R)-5-(heptadecyloxy)-2-(hydroxymethyl )-4-(2-methoxyethoxy)tetrahydrofuran-3-ol nucleotide
aagtgtggctcattaggca

SEQ ID NO: 218 - RNA, 21 nt, synthetic construct
  source 1..21: mol_type = other RNA
  modified_base 1: mod_base = OTHER; note = Vinyl phosphonate 2'O-methyl-nucleotide phosphorothioate
  modified_base 2: mod_base = OTHER; note = 2'fluoro-nucleotide phosphorothioate
  modified_base 3: mod_base = OTHER; note = 2'O-methyl-nucleotide
  modified_base 4: mod_base = OTHER; note = 2'O-methyl-nucleotide
  modified_base 5: mod_base = OTHER; note = 2'O-methyl-nucleotide
  modified_base 6: mod_base = OTHER; note = 2'fluoro-nucleotide
  modified_base 7: mod_base = OTHER; note = 2'O-methyl-nucleotide
  modified_base 8: mod_base = OTHER; note = 2'O-methyl-nucleotide
  modified_base 9: mod_base = OTHER; note = 2'O-methyl-nucleotide
  modified_base 10: mod_base = OTHER; note = 2'O-methyl-nucleotide
  modified_base 11: mod_base = OTHER; note = 2'O-methyl-nucleotide
  modified_base 12: mod_base = OTHER; note = 2'O-methyl-nucleotide
  modified_base 13: mod_base = OTHER; note = 2'O-methyl-nucleotide
  modified_base 14: mod_base = OTHER; note = 2'fluoro-nucleotide
  modified_base 15: mod_base = OTHER; note = 2'O-methyl-nucleotide
  modified_base 16: mod_base = OTHER; note = 2'fluoro-nucleotide
  modified_base 17: mod_base = OTHER; note = 2'O-methyl-nucleotide
  modified_base 18: mod_base = OTHER; note = 2'O-methyl-nucleotide
  modified_base 19: mod_base = OTHER; note = 2'O-methyl-nucleotide phosphorothioate
  modified_base 20: mod_base = OTHER; note = 2'O-methyl-nucleotide phosphorothioate
  modified_base 21: mod_base = OTHER; note = 2'O-methyl-nucleotide
tgcctaatgagccacacttgg

SEQ ID NO: 219 - RNA, 19 nt, synthetic construct
  source 1..19: mol_type = other RNA
  modified_base 1: mod_base = OTHER; note = 2'O-methyl-nucleotide phosphorothioate
  modified_base 2: mod_base = OTHER; note = 2'O-methyl-nucleotide phosphorothioate
  modified_base 3: mod_base = OTHER; note = 2'fluoro-nucleotide
  modified_base 4: mod_base = OTHER; note = 2'O-methyl-nucleotide
  modified_base 5: mod_base = OTHER; note = 2'O-methyl-nucleotide
  modified_base 6: mod_base = OTHER; note = 2'O-methyl-nucleotide
  modified_base 7: mod_base = OTHER; note = 2'fluoro-nucleotide
  modified_base 8: mod_base = OTHER; note = 2'fluoro-nucleotide
  modified_base 9: mod_base = OTHER; note = 2'fluoro-nucleotide
  modified_base 10: mod_base = OTHER; note = 2'O-methyl-nucleotide
  modified_base 11: mod_base = OTHER; note = 2'O-methyl-nucleotide
  modified_base 12: mod_base = OTHER; note = 2'fluoro-nucleotide
  modified_base 13: mod_base = OTHER; note = 2'O-methyl-nucleotide
  modified_base 14: mod_base = OTHER; note = 2'O-methyl-nucleotide
  modified_base 15: mod_base = OTHER; note = 2'O-methyl-nucleotide
  modified_base 16: mod_base = OTHER; note = 2'O-methyl-nucleotide
  modified_base 17: mod_base = OTHER; note = 2'fluoro-nucleotide phosphorothioate
  modified_base 18: mod_base = OTHER; note = 2'O-methyl-nucleotide phosphorothioate
  modified_base 19: mod_base = OTHER; note 2'O-methyl-15-((3r,5r,7r)-adamantan-1-yl)-N-heptylpentadeca namide nucleotide
aagtgtggctcattaggca

SEQ ID NO: 220 - RNA, 21 nt, synthetic construct
  source 1..21: mol_type = other RNA
  modified_base 1: mod_base = OTHER; note = Vinyl phosphonate 2'O-methyl-nucleotide phosphorothioate
  modified_base 2: mod_base = OTHER; note = 2'fluoro-nucleotide phosphorothioate
  modified_base 3: mod_base = OTHER; note = 2'O-methyl-nucleotide
  modified_base 4: mod_base = OTHER; note = 2'O-methyl-nucleotide
  modified_base 5: mod_base = OTHER; note = 2'O-methyl-nucleotide
  modified_base 6: mod_base = OTHER; note = 2'fluoro-nucleotide
  modified_base 7: mod_base = OTHER; note = 2'O-methyl-nucleotide
  modified_base 8: mod_base = OTHER; note = 2'O-methyl-nucleotide
  modified_base 9: mod_base = OTHER; note = 2'O-methyl-nucleotide
  modified_base 10: mod_base = OTHER; note = 2'O-methyl-nucleotide
  modified_base 11: mod_base = OTHER; note = 2'O-methyl-nucleotide
  modified_base 12: mod_base = OTHER; note = 2'O-methyl-nucleotide
  modified_base 13: mod_base = OTHER; note = 2'O-methyl-nucleotide
  modified_base 14: mod_base = OTHER; note = 2'fluoro-nucleotide
  modified_base 15: mod_base = OTHER; note = 2'O-methyl-nucleotide
  modified_base 16: mod_base = OTHER; note = 2'fluoro-nucleotide
  modified_base 17: mod_base = OTHER; note = 2'O-methyl-nucleotide
  modified_base 18: mod_base = OTHER; note = 2'O-methyl-nucleotide
  modified_base 19: mod_base = OTHER; note = 2'O-methyl-nucleotide phosphorothioate
  modified_base 20: mod_base = OTHER; note = 2'O-methyl-nucleotide phosphorothioate
  modified_base 21: mod_base = OTHER; note = 2'O-methyl-nucleotide
tgcctaatgagccacacttgg

SEQ ID NO: 221 - RNA, 23 nt, synthetic construct
  source 1..23: mol_type = other RNA
  modified_base 1: mod_base = OTHER; note = Inverted abasic nucleotide phosphorothioate
  modified_base 2: mod_base = OTHER; note = 2'O-methyl-nucleotide phosphorothioate
  modified_base 3: mod_base = OTHER; note = 2'O-methyl-nucleotide
  modified_base 4: mod_base = OTHER; note = 2'O-methyl-nucleotide
  modified_base 5: mod_base = OTHER; note = 2'O-methyl-nucleotide
  modified_base 6: mod_base = OTHER; note = 2'O-methyl-nucleotide
  modified_base 7: mod_base = OTHER; note = 2'O-methyl-nucleotide
  modified_base 8: mod_base = OTHER; note = 2'O-methyl-nucleotide
  modified_base 9: mod_base = OTHER; note = 2'O-methyl-nucleotide
  modified_base 10: mod_base = OTHER; note = 2'fluoro-nucleotide
  modified_base 11: mod_base = OTHER; note = 2'fluoro-nucleotide
  modified_base 12: mod_base = OTHER; note = 2'fluoro-nucleotide
  modified_base 13: mod_base = OTHER; note = 2'O-methyl-nucleotide
  modified_base 14: mod_base = OTHER; note = 2'O-methyl-nucleotide
  modified_base 15: mod_base = OTHER; note = 2'O-methyl-nucleotide
  modified_base 16: mod_base = OTHER; note = 2'O-methyl-nucleotide
  modified_base 17: mod_base = OTHER; note = 2'O-methyl-nucleotide
  modified_base 18: mod_base = OTHER; note = 2'O-methyl-nucleotide
  modified_base 19: mod_base = OTHER; note = 2'O-methyl-nucleotide
  modified_base 20: mod_base = OTHER; note = 2'O-methyl-nucleotide
  modified_base 21: mod_base = OTHER; note = 2'O-methyl-nucleotide phosphorothioate
  modified_base 22: mod_base = OTHER; note = 2'O-methyl-nucleotide phosphorothioate
  modified_base 23: mod_base = OTHER; note = Inverted abasic N-heptyl-16-(((1R,2S,5R)-2-isopropyl-5-methylcyclohexyl)oxy )hexadecanamide nucleotide
natagtctacaaaccagttgaan

SEQ ID NO: 222 - RNA, 21 nt, synthetic construct
  source 1..21: mol_type = other RNA
  modified_base 1: mod_base = OTHER; note = Vinyl phosphonate 2'O-methyl-nucleotide phosphorothioate
  modified_base 2: mod_base = OTHER; note = 2'fluoro-nucleotide phosphorothioate
  modified_base 3: mod_base = OTHER; note = 2'O-methyl-nucleotide phosphorothioate
  modified_base 4: mod_base = OTHER; note = 2'O-methyl-nucleotide
  modified_base 5: mod_base = OTHER; note = 2'O-methyl-nucleotide
  modified_base 6: mod_base = OTHER; note = 2'fluoro-nucleotide
  modified_base 7: mod_base = OTHER; note = 2'O-methyl-nucleotide
  modified_base 8: mod_base = OTHER; note = 2'fluoro-nucleotide
  modified_base 9: mod_base = OTHER; note = 2'fluoro-nucleotide
  modified_base 10: mod_base = OTHER; note = 2'O-methyl-nucleotide
  modified_base 11: mod_base = OTHER; note = 2'O-methyl-nucleotide
  modified_base 12: mod_base = OTHER; note = 2'O-methyl-nucleotide
  modified_base 13: mod_base = OTHER; note = 2'O-methyl-nucleotide
  modified_base 14: mod_base = OTHER; note = 2'fluoro-nucleotide
  modified_base 15: mod_base = OTHER; note = 2'O-methyl-nucleotide
  modified_base 16: mod_base = OTHER; note = 2'fluoro-nucleotide
  modified_base 17: mod_base = OTHER; note = 2'O-methyl-nucleotide
  modified_base 18: mod_base = OTHER; note = 2'O-methyl-nucleotide
  modified_base 19: mod_base = OTHER; note = 2'O-methyl-nucleotide phosphorothioate
  modified_base 20: mod_base = OTHER; note = 2'O-methyl-nucleotide phosphorothioate
  modified_base 21: mod_base = OTHER; note = 2'O-methyl-nucleotide
ttcaactggtttgtagactat

SEQ ID NO: 223 - RNA, 23 nt, synthetic construct
  source 1..23: mol_type = other RNA
  modified_base 1: mod_base = OTHER; note = Inverted abasic nucleotide phosphorothioate
  modified_base 2: mod_base = OTHER; note = 2'O-methyl-nucleotide phosphorothioate
  modified_base 3: mod_base = OTHER; note = 2'O-methyl-nucleotide
  modified_base 4: mod_base = OTHER; note = 2'O-methyl-nucleotide
  modified_base 5: mod_base = OTHER; note = 2'O-methyl-nucleotide
  modified_base 6: mod_base = OTHER; note = 2'O-methyl-nucleotide
  modified_base 7: mod_base = OTHER; note = 2'O-methyl-nucleotide
  modified_base 8: mod_base = OTHER; note = 2'O-methyl-nucleotide
  modified_base 9: mod_base = OTHER; note = 2'O-methyl-nucleotide
  modified_base 10: mod_base = OTHER; note = 2'fluoro-nucleotide
  modified_base 11: mod_base = OTHER; note = 2'fluoro-nucleotide
  modified_base 12: mod_base = OTHER; note = 2'fluoro-nucleotide
  modified_base 13: mod_base = OTHER; note = 2'O-methyl-nucleotide
  modified_base 14: mod_base = OTHER; note = 2'O-methyl-nucleotide
  modified_base 15: mod_base = OTHER; note = 2'O-methyl-nucleotide
  modified_base 16: mod_base = OTHER; note = 2'O-methyl-nucleotide
  modified_base 17: mod_base = OTHER; note = 2'O-methyl-nucleotide
  modified_base 18: mod_base = OTHER; note = 2'O-methyl-nucleotide
  modified_base 19: mod_base = OTHER; note = 2'O-methyl-nucleotide
  modified_base 20: mod_base = OTHER; note = 2'O-methyl-nucleotide
  modified_base 21: mod_base = OTHER; note = 2'O-methyl-nucleotide phosphorothioate
  modified_base 22: mod_base = OTHER; note = 2'O-methyl-nucleotide phosphorothioate
  modified_base 23: mod_base = OTHER; note = Inverted abasic N-hexadecyl-N-(2-((2-(heptylamino)-2-oxoethyl)(methyl)amino )-2-oxoethyl)palmitamide nucleotide
natagtctacaaaccagttgaan

SEQ ID NO: 224 - RNA, 21 nt, synthetic construct
  source 1..21: mol_type = other RNA
  modified_base 1: mod_base = OTHER; note = Vinyl phosphonate 2'O-methyl-nucleotide phosphorothioate
  modified_base 2: mod_base = OTHER; note = 2'fluoro-nucleotide phosphorothioate
  modified_base 3: mod_base = OTHER; note = 2'O-methyl-nucleotide phosphorothioate
  modified_base 4: mod_base = OTHER; note = 2'O-methyl-nucleotide
  modified_base 5: mod_base = OTHER; note = 2'O-methyl-nucleotide
  modified_base 6: mod_base = OTHER; note = 2'fluoro-nucleotide
  modified_base 7: mod_base = OTHER; note = 2'O-methyl-nucleotide
  modified_base 8: mod_base = OTHER; note = 2'fluoro-nucleotide
  modified_base 9: mod_base = OTHER; note = 2'fluoro-nucleotide
  modified_base 10: mod_base = OTHER; note = 2'O-methyl-nucleotide
  modified_base 11: mod_base = OTHER; note = 2'O-methyl-nucleotide
  modified_base 12: mod_base = OTHER; note = 2'O-methyl-nucleotide
  modified_base 13: mod_base = OTHER; note = 2'O-methyl-nucleotide
  modified_base 14: mod_base = OTHER; note = 2'fluoro-nucleotide
  modified_base 15: mod_base = OTHER; note = 2'O-methyl-nucleotide
  modified_base 16: mod_base = OTHER; note = 2'fluoro-nucleotide
  modified_base 17: mod_base = OTHER; note = 2'O-methyl-nucleotide
  modified_base 18: mod_base = OTHER; note = 2'O-methyl-nucleotide
  modified_base 19: mod_base = OTHER; note = 2'O-methyl-nucleotide phosphorothioate
  modified_base 20: mod_base = OTHER; note = 2'O-methyl-nucleotide phosphorothioate
  modified_base 21: mod_base = OTHER; note = 2'O-methyl-nucleotide
ttcaactggtttgtagactat

SEQ ID NO: 225 - RNA, 23 nt, synthetic construct
  source 1..23: mol_type = other RNA
  modified_base 1: mod_base = OTHER; note = Inverted abasic nucleotide phosphorothioate
  modified_base 2: mod_base = OTHER; note = 2'O-methyl-nucleotide phosphorothioate
  modified_base 3: mod_base = OTHER; note = 2'O-methyl-nucleotide
  modified_base 4: mod_base = OTHER; note = 2'O-methyl-nucleotide
  modified_base 5: mod_base = OTHER; note = 2'O-methyl-nucleotide
  modified_base 6: mod_base = OTHER; note = 2'O-methyl-nucleotide
  modified_base 7: mod_base = OTHER; note = 2'O-methyl-nucleotide
  modified_base 8: mod_base = OTHER; note = 2'O-methyl-nucleotide
  modified_base 9: mod_base = OTHER; note = 2'O-methyl-nucleotide
  modified_base 10: mod_base = OTHER; note = 2'fluoro-nucleotide
  modified_base 11: mod_base = OTHER; note = 2'fluoro-nucleotide
  modified_base 12: mod_base = OTHER; note = 2'fluoro-nucleotide
  modified_base 13: mod_base = OTHER; note = 2'O-methyl-nucleotide
  modified_base 14: mod_base = OTHER; note = 2'O-methyl-nucleotide
  modified_base 15: mod_base = OTHER; note = 2'O-methyl-nucleotide
  modified_base 16: mod_base = OTHER; note = 2'O-methyl-nucleotide
  modified_base 17: mod_base = OTHER; note = 2'O-methyl-nucleotide
  modified_base 18: mod_base = OTHER; note = 2'O-methyl-nucleotide
  modified_base 19: mod_base = OTHER; note = 2'O-methyl-nucleotide
  modified_base 20: mod_base = OTHER; note = 2'O-methyl-nucleotide
  modified_base 21: mod_base = OTHER; note = 2'O-methyl-nucleotide phosphorothioate
  modified_base 22: mod_base = OTHER; note = 2'O-methyl-nucleotide phosphorothioate
  modified_base 23: mod_base = OTHER; note = Inverted abasic N-heptyl-16-(((1S,2R,4S)-1,7,7-trimethylbicyclo[2.2.1]hepta n-2-yl)oxy)hexadecanamide nucleotide
natagtctacaaaccagttgaan

SEQ ID NO: 226 - RNA, 21 nt, synthetic construct
  source 1..21: mol_type = other RNA
  modified_base 1: mod_base = OTHER; note = Vinyl phosphonate 2'O-methyl-nucleotide phosphorothioate
  modified_base 2: mod_base = OTHER; note = 2'fluoro-nucleotide phosphorothioate
  modified_base 3: mod_base = OTHER; note = 2'O-methyl-nucleotide phosphorothioate
  modified_base 4: mod_base = OTHER; note = 2'O-methyl-nucleotide
  modified_base 5: mod_base = OTHER; note = 2'O-methyl-nucleotide
  modified_base 6: mod_base = OTHER; note = 2'fluoro-nucleotide
  modified_base 7: mod_base = OTHER; note = 2'O-methyl-nucleotide
  modified_base 8: mod_base = OTHER; note = 2'fluoro-nucleotide
  modified_base 9: mod_base = OTHER; note = 2'fluoro-nucleotide
  modified_base 10: mod_base = OTHER; note = 2'O-methyl-nucleotide
  modified_base 11: mod_base = OTHER; note = 2'O-methyl-nucleotide
  modified_base 12: mod_base = OTHER; note = 2'O-methyl-nucleotide
  modified_base 13: mod_base = OTHER; note = 2'O-methyl-nucleotide
  modified_base 14: mod_base = OTHER; note = 2'fluoro-nucleotide
  modified_base 15: mod_base = OTHER; note = 2'O-methyl-nucleotide
  modified_base 16: mod_base = OTHER; note = 2'fluoro-nucleotide
  modified_base 17: mod_base = OTHER; note = 2'O-methyl-nucleotide
  modified_base 18: mod_base = OTHER; note = 2'O-methyl-nucleotide
  modified_base 19: mod_base = OTHER; note = 2'O-methyl-nucleotide phosphorothioate
  modified_base 20: mod_base = OTHER; note = 2'O-methyl-nucleotide phosphorothioate
  modified_base 21: mod_base = OTHER; note = 2'O-methyl-nucleotide
ttcaactggtttgtagactat

SEQ ID NO: 227 - RNA, 23 nt, synthetic construct
  source 1..23: mol_type = other RNA
  modified_base 1: mod_base = OTHER; note = Inverted abasic nucleotide phosphorothioate
  modified_base 2: mod_base = OTHER; note = 2'O-methyl-nucleotide phosphorothioate
  modified_base 3: mod_base = OTHER; note = 2'O-methyl-nucleotide
  modified_base 4: mod_base = OTHER; note = 2'O-methyl-nucleotide
  modified_base 5: mod_base = OTHER; note = 2'O-methyl-nucleotide
  modified_base 6: mod_base = OTHER; note = 2'O-methyl-nucleotide
  modified_base 7: mod_base = OTHER; note = 2'O-methyl-nucleotide
  modified_base 8: mod_base = OTHER; note = 2'O-methyl-nucleotide
  modified_base 9: mod_base = OTHER; note = 2'O-methyl-nucleotide
  modified_base 10: mod_base = OTHER; note = 2'fluoro-nucleotide
  modified_base 11: mod_base = OTHER; note = 2'fluoro-nucleotide
  modified_base 12: mod_base = OTHER; note = 2'fluoro-nucleotide
  modified_base 13: mod_base = OTHER; note = 2'O-methyl-nucleotide
  modified_base 14: mod_base = OTHER; note = 2'O-methyl-nucleotide
  modified_base 15: mod_base = OTHER; note = 2'O-methyl-nucleotide
  modified_base 16: mod_base = OTHER; note = 2'O-methyl-nucleotide
  modified_base 17: mod_base = OTHER; note = 2'O-methyl-nucleotide
  modified_base 18: mod_base = OTHER; note = 2'O-methyl-nucleotide
  modified_base 19: mod_base = OTHER; note = 2'O-methyl-nucleotide
  modified_base 20: mod_base = OTHER; note = 2'O-methyl-nucleotide
  modified_base 21: mod_base = OTHER; note = 2'O-methyl-nucleotide phosphorothioate
  modified_base 22: mod_base = OTHER; note = 2'O-methyl-nucleotide phosphorothioate
  modified_base 23: mod_base = OTHER; note = Inverted abasic 15-((3r,5r,7r)-adamantan-1-yl)-N-heptylpentadecanamide nucleotide
natagtctacaaaccagttgaan

SEQ ID NO: 228 - RNA, 21 nt, synthetic construct
  source 1..21: mol_type = other RNA
  modified_base 1: mod_base = OTHER; note = Vinyl phosphonate 2'O-methyl-nucleotide phosphorothioate
  modified_base 2: mod_base = OTHER; note = 2'fluoro-nucleotide phosphorothioate
  modified_base 3: mod_base = OTHER; note = 2'O-methyl-nucleotide phosphorothioate
  modified_base 4: mod_base = OTHER; note = 2'O-methyl-nucleotide
  modified_base 5: mod_base = OTHER; note = 2'O-methyl-nucleotide
  modified_base 6: mod_base = OTHER; note = 2'fluoro-nucleotide
  modified_base 7: mod_base = OTHER; note = 2'O-methyl-nucleotide
  modified_base 8: mod_base = OTHER; note = 2'fluoro-nucleotide
  modified_base 9: mod_base = OTHER; note = 2'fluoro-nucleotide
  modified_base 10: mod_base = OTHER; note = 2'O-methyl-nucleotide
  modified_base 11: mod_base = OTHER; note = 2'O-methyl-nucleotide
  modified_base 12: mod_base = OTHER; note = 2'O-methyl-nucleotide
  modified_base 13: mod_base = OTHER; note = 2'O-methyl-nucleotide
  modified_base 14: mod_base = OTHER; note = 2'fluoro-nucleotide
  modified_base 15: mod_base = OTHER; note = 2'O-methyl-nucleotide
  modified_base 16: mod_base = OTHER; note = 2'fluoro-nucleotide
  modified_base 17: mod_base = OTHER; note = 2'O-methyl-nucleotide
  modified_base 18: mod_base = OTHER; note = 2'O-methyl-nucleotide
  modified_base 19: mod_base = OTHER; note = 2'O-methyl-nucleotide phosphorothioate
  modified_base 20: mod_base = OTHER; note = 2'O-methyl-nucleotide phosphorothioate
  modified_base 21: mod_base = OTHER; note = 2'O-methyl-nucleotide
ttcaactggtttgtagactat

SEQ ID NO: 229 - RNA, 23 nt, synthetic construct
  source 1..23: mol_type = other RNA
  modified_base 1: mod_base = OTHER; note = Inverted abasic nucleotide phosphorothioate
  modified_base 2: mod_base = OTHER; note = 2'O-methyl-nucleotide phosphorothioate
  modified_base 3: mod_base = OTHER; note = 2'O-methyl-nucleotide
  modified_base 4: mod_base = OTHER; note = 2'O-methyl-nucleotide
  modified_base 5: mod_base = OTHER; note = 2'O-methyl-nucleotide
  modified_base 6: mod_base = OTHER; note = 2'O-methyl-nucleotide
  modified_base 7: mod_base = OTHER; note = 2'O-methyl-nucleotide
  modified_base 8: mod_base = OTHER; note = 2'O-methyl-nucleotide
  modified_base 9: mod_base = OTHER; note = 2'O-methyl-nucleotide
  modified_base 10: mod_base = OTHER; note = 2'fluoro-nucleotide
  modified_base 11: mod_base = OTHER; note = 2'fluoro-nucleotide
  modified_base 12: mod_base = OTHER; note = 2'fluoro-nucleotide
  modified_base 13: mod_base = OTHER; note = 2'O-methyl-nucleotide
  modified_base 14: mod_base = OTHER; note = 2'O-methyl-nucleotide
  modified_base 15: mod_base = OTHER; note = 2'O-methyl-nucleotide
  modified_base 16: mod_base = OTHER; note = 2'O-methyl-nucleotide
  modified_base 17: mod_base = OTHER; note = 2'O-methyl-nucleotide
  modified_base 18: mod_base = OTHER; note = 2'O-methyl-nucleotide
  modified_base 19: mod_base = OTHER; note = 2'O-methyl-nucleotide
  modified_base 20: mod_base = OTHER; note = 2'O-methyl-nucleotide
  modified_base 21: mod_base = OTHER; note = 2'O-methyl-nucleotide phosphorothioate
  modified_base 22: mod_base = OTHER; note = 2'O-methyl-nucleotide phosphorothioate
  modified_base 23: mod_base = OTHER; note = Inverted abasic (2R,3R,4S,5R)-5,6-bis(hexadecyloxy)-2-(hydroxymethyl)-4-met hoxytetrahydro-2H-pyran-3-ol nucleotide
natagtctacaaaccagttgaan

SEQ ID NO: 230 - RNA, 21 nt, synthetic construct
  source 1..21: mol_type = other RNA
  modified_base 1: mod_base = OTHER; note = Vinyl phosphonate 2'O-methyl-nucleotide phosphorothioate
  modified_base 2: mod_base = OTHER; note = 2'fluoro-nucleotide phosphorothioate
  modified_base 3: mod_base = OTHER; note = 2'O-methyl-nucleotide phosphorothioate
  modified_base 4: mod_base = OTHER; note = 2'O-methyl-nucleotide
  modified_base 5: mod_base = OTHER; note = 2'O-methyl-nucleotide
  modified_base 6: mod_base = OTHER; note = 2'fluoro-nucleotide
  modified_base 7: mod_base = OTHER; note = 2'O-methyl-nucleotide
  modified_base 8: mod_base = OTHER; note = 2'fluoro-nucleotide
  modified_base 9: mod_base = OTHER; note = 2'fluoro-nucleotide
  modified_base 10: mod_base = OTHER; note = 2'O-methyl-nucleotide
  modified_base 11: mod_base = OTHER; note = 2'O-methyl-nucleotide
  modified_base 12: mod_base = OTHER; note = 2'O-methyl-nucleotide
  modified_base 13: mod_base = OTHER; note = 2'O-methyl-nucleotide
  modified_base 14: mod_base = OTHER; note = 2'fluoro-nucleotide
  modified_base 15: mod_base = OTHER; note = 2'O-methyl-nucleotide
  modified_base 16: mod_base = OTHER; note = 2'fluoro-nucleotide
  modified_base 17: mod_base = OTHER; note = 2'O-methyl-nucleotide
  modified_base 18: mod_base = OTHER; note = 2'O-methyl-nucleotide
  modified_base 19: mod_base = OTHER; note = 2'O-methyl-nucleotide phosphorothioate
  modified_base 20: mod_base = OTHER; note = 2'O-methyl-nucleotide phosphorothioate
  modified_base 21: mod_base = OTHER; note = 2'O-methyl-nucleotide
ttcaactggtttgtagactat

SEQ ID NO: 231 - RNA, 23 nt, synthetic construct
  source 1..23: mol_type = other RNA
  modified_base 1: mod_base = OTHER; note = Inverted abasic nucleotide phosphorothioate
  modified_base 2: mod_base = OTHER; note = 2'O-methyl-nucleotide phosphorothioate
  modified_base 3: mod_base = OTHER; note = 2'O-methyl-nucleotide
  modified_base 4: mod_base = OTHER; note = 2'O-methyl-nucleotide
  modified_base 5: mod_base = OTHER; note = 2'O-methyl-nucleotide
  modified_base 6: mod_base = OTHER; note = 2'O-methyl-nucleotide
  modified_base 7: mod_base = OTHER; note = 2'O-methyl-nucleotide
  modified_base 8: mod_base = OTHER; note = 2'O-methyl-nucleotide
  modified_base 9: mod_base = OTHER; note = 2'O-methyl-nucleotide
  modified_base 10: mod_base = OTHER; note = 2'fluoro-nucleotide
  modified_base 11: mod_base = OTHER; note = 2'fluoro-nucleotide
  modified_base 12: mod_base = OTHER; note = 2'fluoro-nucleotide
  modified_base 13: mod_base = OTHER; note = 2'O-methyl-nucleotide
  modified_base 14: mod_base = OTHER; note = 2'O-methyl-nucleotide
  modified_base 15: mod_base = OTHER; note = 2'O-methyl-nucleotide
  modified_base 16: mod_base = OTHER; note = 2'O-methyl-nucleotide
  modified_base 17: mod_base = OTHER; note = 2'O-methyl-nucleotide
  modified_base 18: mod_base = OTHER; note = 2'O-methyl-nucleotide
  modified_base 19: mod_base = OTHER; note = 2'O-methyl-nucleotide
  modified_base 20: mod_base = OTHER; note = 2'O-methyl-nucleotide
  modified_base 21: mod_base = OTHER; note = 2'O-methyl-nucleotide phosphorothioate
  modified_base 22: mod_base = OTHER; note = 2'O-methyl-nucleotide phosphorothioate
  modified_base 23: mod_base = OTHER; note = Inverted abasic (2R,3R,4R,5R)-4,5-bis(hexadecyloxy)-2-(hydroxymethyl)tetrah ydrofuran-3-ol nucleotide
natagtctacaaaccagttgaan

SEQ ID NO: 232 - RNA, 21 nt, synthetic construct
  source 1..21: mol_type = other RNA
  modified_base 1: mod_base = OTHER; note = Vinyl phosphonate 2'O-methyl-nucleotide phosphorothioate
  modified_base 2: mod_base = OTHER; note = 2'fluoro-nucleotide phosphorothioate
  modified_base 3: mod_base = OTHER; note = 2'O-methyl-nucleotide phosphorothioate
  modified_base 4: mod_base = OTHER; note = 2'O-methyl-nucleotide
  modified_base 5: mod_base = OTHER; note = 2'O-methyl-nucleotide
  modified_base 6: mod_base = OTHER; note = 2'fluoro-nucleotide
  modified_base 7: mod_base = OTHER; note = 2'O-methyl-nucleotide
  modified_base 8: mod_base = OTHER; note = 2'fluoro-nucleotide
  modified_base 9: mod_base = OTHER; note = 2'fluoro-nucleotide
  modified_base 10: mod_base = OTHER; note = 2'O-methyl-nucleotide
  modified_base 11: mod_base = OTHER; note = 2'O-methyl-nucleotide
  modified_base 12: mod_base = OTHER; note = 2'O-methyl-nucleotide
  modified_base 13: mod_base = OTHER; note = 2'O-methyl-nucleotide
  modified_base 14: mod_base = OTHER; note = 2'fluoro-nucleotide
  modified_base 15: mod_base = OTHER; note = 2'O-methyl-nucleotide
  modified_base 16: mod_base = OTHER; note = 2'fluoro-nucleotide
  modified_base 17: mod_base = OTHER; note = 2'O-methyl-nucleotide
  modified_base 18: mod_base = OTHER; note = 2'O-methyl-nucleotide
  modified_base 19: mod_base = OTHER; note = 2'O-methyl-nucleotide phosphorothioate
  modified_base 20: mod_base = OTHER; note = 2'O-methyl-nucleotide phosphorothioate
  modified_base 21: mod_base = OTHER; note = 2'O-methyl-nucleotide
ttcaactggtttgtagactat

SEQ ID NO: 233 - RNA, 23 nt, synthetic construct
  source 1..23: mol_type = other RNA
  modified_base 1: mod_base = OTHER; note = Inverted abasic nucleotide phosphorothioate
  modified_base 2: mod_base = OTHER; note = 2'O-methyl-nucleotide phosphorothioate
  modified_base 3: mod_base = OTHER; note = 2'O-methyl-nucleotide
  modified_base 4: mod_base = OTHER; note = 2'O-methyl-nucleotide
  modified_base 5: mod_base = OTHER; note = 2'O-methyl-nucleotide
  modified_base 6: mod_base = OTHER; note = 2'O-methyl-nucleotide
  modified_base 7: mod_base = OTHER; note = 2'O-methyl-nucleotide
  modified_base 8: mod_base = OTHER; note = 2'O-methyl-nucleotide
  modified_base 9: mod_base = OTHER; note = 2'O-methyl-nucleotide
  modified_base 10: mod_base = OTHER; note = 2'fluoro-nucleotide
  modified_base 11: mod_base = OTHER; note = 2'fluoro-nucleotide
  modified_base 12: mod_base = OTHER; note = 2'fluoro-nucleotide
  modified_base 13: mod_base = OTHER; note = 2'O-methyl-nucleotide
  modified_base 14: mod_base = OTHER; note = 2'O-methyl-nucleotide
  modified_base 15: mod_base = OTHER; note = 2'O-methyl-nucleotide
  modified_base 16: mod_base = OTHER; note = 2'O-methyl-nucleotide
  modified_base 17: mod_base = OTHER; note = 2'O-methyl-nucleotide
  modified_base 18: mod_base = OTHER; note = 2'O-methyl-nucleotide
  modified_base 19: mod_base = OTHER; note = 2'O-methyl-nucleotide
  modified_base 20: mod_base = OTHER; note = 2'O-methyl-nucleotide
  modified_base 21: mod_base = OTHER; note = 2'O-methyl-nucleotide phosphorothioate
  modified_base 22: mod_base = OTHER; note = 2'O-methyl-nucleotide phosphorothioate
  modified_base 23: mod_base = OTHER; note = Inverted abasic (2R,3R,4S,5R,6R)-4,6-bis(hexadecyloxy)-2-(hydroxymethyl)-5- methoxytetrahydro-2H-pyran-3-ol nucleotide
natagtctacaaaccagttgaan

SEQ ID NO: 234 - RNA, 21 nt, synthetic construct
  source 1..21: mol_type = other RNA
  modified_base 1: mod_base = OTHER; note = Vinyl phosphonate 2'O-methyl-nucleotide phosphorothioate
  modified_base 2: mod_base = OTHER; note = 2'fluoro-nucleotide phosphorothioate
  modified_base 3: mod_base = OTHER; note = 2'O-methyl-nucleotide phosphorothioate
  modified_base 4: mod_base = OTHER; note = 2'O-methyl-nucleotide
  modified_base 5: mod_base = OTHER; note = 2'O-methyl-nucleotide
  modified_base 6: mod_base = OTHER; note = 2'fluoro-nucleotide
  modified_base 7: mod_base = OTHER; note = 2'O-methyl-nucleotide
  modified_base 8: mod_base = OTHER; note = 2'fluoro-nucleotide
  modified_base 9: mod_base = OTHER; note = 2'fluoro-nucleotide
  modified_base 10: mod_base = OTHER; note = 2'O-methyl-nucleotide
  modified_base 11: mod_base = OTHER; note = 2'O-methyl-nucleotide
  modified_base 12: mod_base = OTHER; note = 2'O-methyl-nucleotide
  modified_base 13: mod_base = OTHER; note = 2'O-methyl-nucleotide
  modified_base 14: mod_base = OTHER; note = 2'fluoro-nucleotide
  modified_base 15: mod_base = OTHER; note = 2'O-methyl-nucleotide
  modified_base 16: mod_base = OTHER; note = 2'fluoro-nucleotide
  modified_base 17: mod_base = OTHER; note = 2'O-methyl-nucleotide
  modified_base 18: mod_base = OTHER; note = 2'O-methyl-nucleotide
  modified_base 19: mod_base = OTHER; note = 2'O-methyl-nucleotide phosphorothioate
  modified_base 20: mod_base = OTHER; note = 2'O-methyl-nucleotide phosphorothioate
  modified_base 21: mod_base = OTHER; note = 2'O-methyl-nucleotide
ttcaactggtttgtagactat

SEQ ID NO: 235 - RNA, 23 nt, synthetic construct
  source 1..23: mol_type = other RNA
  modified_base 1: mod_base = OTHER; note = Inverted abasic nucleotide phosphorothioate
  modified_base 2: mod_base = OTHER; note = 2'O-methyl-nucleotide phosphorothioate
  modified_base 3: mod_base = OTHER; note = 2'O-methyl-nucleotide
  modified_base 4: mod_base = OTHER; note = 2'O-methyl-nucleotide
  modified_base 5: mod_base = OTHER; note = 2'O-methyl-nucleotide
  modified_base 6: mod_base = OTHER; note = 2'O-methyl-nucleotide
  modified_base 7: mod_base = OTHER; note = 2'O-methyl-nucleotide
  modified_base 8: mod_base = OTHER; note = (2S)-1,7,7-trimethylbicyclo[2.2.1]heptan-2-yl 16-((6-(((2R,3R,4R,5R)-2-(2,4-dioxo-3,4-dihydropyrimidin-1( 2H)-yl)-4-hydroxy-5-(hydroxymethyl)tetrahydrofuran-3-yl)oxy )hexyl)amino)-16-oxohexadecanoate nucleotide
  modified_base 9: mod_base = OTHER; note = 2'O-methyl-nucleotide
  modified_base 10: mod_base = OTHER; note = 2'fluoro-nucleotide
  modified_base 11: mod_base = OTHER; note = 2'fluoro-nucleotide
  modified_base 12: mod_base = OTHER; note = 2'fluoro-nucleotide
  modified_base 13: mod_base = OTHER; note = 2'O-methyl-nucleotide
  modified_base 14: mod_base = OTHER; note = 2'O-methyl-nucleotide
  modified_base 15: mod_base = OTHER; note = 2'O-methyl-nucleotide
  modified_base 16: mod_base = OTHER; note = 2'O-methyl-nucleotide
  modified_base 17: mod_base = OTHER; note = 2'O-methyl-nucleotide
  modified_base 18: mod_base = OTHER; note = 2'O-methyl-nucleotide
  modified_base 19: mod_base = OTHER; note = 2'O-methyl-nucleotide
  modified_base 20: mod_base = OTHER; note = 2'O-methyl-nucleotide
  modified_base 21: mod_base = OTHER; note = 2'O-methyl-nucleotide phosphorothioate
  modified_base 22: mod_base = OTHER; note = 2'O-methyl-nucleotide phosphorothioate
  modified_base 23: mod_base = OTHER; note = Inverted abasic nucleotide
natagtctacaaaccagttgaan

SEQ ID NO: 236 - RNA, 21 nt, synthetic construct
  source 1..21: mol_type = other RNA
  modified_base 1: mod_base = OTHER; note = Vinyl phosphonate 2'O-methyl-nucleotide phosphorothioate
  modified_base 2: mod_base = OTHER; note = 2'fluoro-nucleotide phosphorothioate
  modified_base 3: mod_base = OTHER; note = 2'O-methyl-nucleotide phosphorothioate
  modified_base 4: mod_base = OTHER; note = 2'O-methyl-nucleotide
  modified_base 5: mod_base = OTHER; note = 2'O-methyl-nucleotide
  modified_base 6: mod_base = OTHER; note = 2'fluoro-nucleotide
  modified_base 7: mod_base = OTHER; note = 2'O-methyl-nucleotide
  modified_base 8: mod_base = OTHER; note = 2'fluoro-nucleotide
  modified_base 9: mod_base = OTHER; note = 2'fluoro-nucleotide
  modified_base 10: mod_base = OTHER; note = 2'O-methyl-nucleotide
  modified_base 11: mod_base = OTHER; note = 2'O-methyl-nucleotide
  modified_base 12: mod_base = OTHER; note = 2'O-methyl-nucleotide
  modified_base 13: mod_base = OTHER; note = 2'O-methyl-nucleotide
  modified_base 14: mod_base = OTHER; note = 2'fluoro-nucleotide
  modified_base 15: mod_base = OTHER; note = 2'O-methyl-nucleotide
  modified_base 16: mod_base = OTHER; note = 2'fluoro-nucleotide
  modified_base 17: mod_base = OTHER; note = 2'O-methyl-nucleotide
  modified_base 18: mod_base = OTHER; note = 2'O-methyl-nucleotide
  modified_base 19: mod_base = OTHER; note = 2'O-methyl-nucleotide phosphorothioate
  modified_base 20: mod_base = OTHER; note = 2'O-methyl-nucleotide phosphorothioate
  modified_base 21: mod_base = OTHER; note = 2'O-methyl-nucleotide
ttcaactggtttgtagactat

SEQ ID NO: 237 - RNA, 23 nt, synthetic construct
  source 1..23: mol_type = other RNA
  modified_base 1: mod_base = OTHER; note = Inverted abasic nucleotide phosphorothioate
  modified_base 2: mod_base = OTHER; note = 2'O-methyl-nucleotide phosphorothioate
  modified_base 3: mod_base = OTHER; note = 2'O-methyl-nucleotide
  modified_base 4: mod_base = OTHER; note = 2'O-methyl-nucleotide
  modified_base 5: mod_base = OTHER; note = 2'O-methyl-nucleotide
  modified_base 6: mod_base = OTHER; note = 2'O-methyl-nucleotide
  modified_base 7: mod_base = OTHER; note = 2'O-methyl-nucleotide
  modified_base 8: mod_base = OTHER; note N-(2-((2-((6-(((2R,3R,4R,5R)-2-(2,4-dioxo-3,4-dihydropyrimi din-1(2H)-yl)-4-hydroxy-5-(hydroxymethyl)tetrahydrofuran-3- yl)oxy)hexyl)amino)-2-oxoethyl)(methyl)amino)-2-oxoethyl)-N -hexadecylpalmitamide nucleotide
  modified_base 9: mod_base = OTHER; note = 2'O-methyl-nucleotide
  modified_base 10: mod_base = OTHER; note = 2'fluoro-nucleotide
  modified_base 11: mod_base = OTHER; note = 2'fluoro-nucleotide
  modified_base 12: mod_base = OTHER; note = 2'fluoro-nucleotide
  modified_base 13: mod_base = OTHER; note = 2'O-methyl-nucleotide
  modified_base 14: mod_base = OTHER; note = 2'O-methyl-nucleotide
  modified_base 15: mod_base = OTHER; note = 2'O-methyl-nucleotide
  modified_base 16: mod_base = OTHER; note = 2'O-methyl-nucleotide
  modified_base 17: mod_base = OTHER; note = 2'O-methyl-nucleotide
  modified_base 18: mod_base = OTHER; note = 2'O-methyl-nucleotide
  modified_base 19: mod_base = OTHER; note = 2'O-methyl-nucleotide
  modified_base 20: mod_base = OTHER; note = 2'O-methyl-nucleotide
  modified_base 21: mod_base = OTHER; note = 2'O-methyl-nucleotide phosphorothioate
  modified_base 22: mod_base = OTHER; note = 2'O-methyl-nucleotide phosphorothioate
  modified_base 23: mod_base = OTHER; note = Inverted abasic nucleotide
natagtctacaaaccagttgaan

SEQ ID NO: 238 - RNA, 21 nt, synthetic construct
  source 1..21: mol_type = other RNA
  modified_base 1: mod_base = OTHER; note = Vinyl phosphonate 2'O-methyl-nucleotide phosphorothioate
  modified_base 2: mod_base = OTHER; note = 2'fluoro-nucleotide phosphorothioate
  modified_base 3: mod_base = OTHER; note = 2'O-methyl-nucleotide phosphorothioate
  modified_base 4: mod_base = OTHER; note = 2'O-methyl-nucleotide
  modified_base 5: mod_base = OTHER; note = 2'O-methyl-nucleotide
  modified_base 6: mod_base = OTHER; note = 2'fluoro-nucleotide
  modified_base 7: mod_base = OTHER; note = 2'O-methyl-nucleotide
  modified_base 8: mod_base = OTHER; note = 2'fluoro-nucleotide
  modified_base 9: mod_base = OTHER; note = 2'fluoro-nucleotide
  modified_base 10: mod_base = OTHER; note = 2'O-methyl-nucleotide
  modified_base 11: mod_base = OTHER; note = 2'O-methyl-nucleotide
  modified_base 12: mod_base = OTHER; note = 2'O-methyl-nucleotide
  modified_base 13: mod_base = OTHER; note = 2'O-methyl-nucleotide
  modified_base 14: mod_base = OTHER; note = 2'fluoro-nucleotide
  modified_base 15: mod_base = OTHER; note = 2'O-methyl-nucleotide
  modified_base 16: mod_base = OTHER; note = 2'fluoro-nucleotide
  modified_base 17: mod_base = OTHER; note = 2'O-methyl-nucleotide
  modified_base 18: mod_base = OTHER; note = 2'O-methyl-nucleotide
  modified_base 19: mod_base = OTHER; note = 2'O-methyl-nucleotide phosphorothioate
  modified_base 20: mod_base = OTHER; note = 2'O-methyl-nucleotide phosphorothioate
  modified_base 21: mod_base = OTHER; note = 2'O-methyl-nucleotide
ttcaactggtttgtagactat

SEQ ID NO: 239 - RNA, 23 nt, synthetic construct
  source 1..23: mol_type = other RNA
  modified_base 1: mod_base = OTHER; note = Inverted abasic nucleotide phosphorothioate
  modified_base 2: mod_base = OTHER; note = 2'O-methyl-nucleotide phosphorothioate
  modified_base 3: mod_base = OTHER; note = 2'O-methyl-nucleotide
  modified_base 4: mod_base = OTHER; note = 2'O-methyl-nucleotide
  modified_base 5: mod_base = OTHER; note = 2'O-methyl-nucleotide
  modified_base 6: mod_base = OTHER; note = 2'O-methyl-nucleotide
  modified_base 7: mod_base = OTHER; note = 2'O-methyl-nucleotide
  modified_base 8: mod_base = OTHER; note = (1R,2S,5R)-2-isopropyl-5-methylcyclohexyl 16-((6-(((2R,3R,4R,5R)-2-(2,4-dioxo-3,4-dihydropyrimidin-1( 2H)-yl)-4-hydroxy-5-(hydroxymethyl)tetrahydrofuran-3-yl)oxy )hexyl)amino)-16-oxohexadecanoate nucleotide
  modified_base 9: mod_base = OTHER; note = 2'O-methyl-nucleotide
  modified_base 10: mod_base = OTHER; note = 2'fluoro-nucleotide
  modified_base 11: mod_base = OTHER; note = 2'fluoro-nucleotide
  modified_base 12: mod_base = OTHER; note = 2'fluoro-nucleotide
  modified_base 13: mod_base = OTHER; note = 2'O-methyl-nucleotide
  modified_base 14: mod_base = OTHER; note = 2'O-methyl-nucleotide
  modified_base 15: mod_base = OTHER; note = 2'O-methyl-nucleotide
  modified_base 16: mod_base = OTHER; note = 2'O-methyl-nucleotide
  modified_base 17: mod_base = OTHER; note = 2'O-methyl-nucleotide
  modified_base 18: mod_base = OTHER; note = 2'O-methyl-nucleotide
  modified_base 19: mod_base = OTHER; note = 2'O-methyl-nucleotide
  modified_base 20: mod_base = OTHER; note = 2'O-methyl-nucleotide
  modified_base 21: mod_base = OTHER; note = 2'O-methyl-nucleotide phosphorothioate
  modified_base 22: mod_base = OTHER; note = 2'O-methyl-nucleotide phosphorothioate
  modified_base 23: mod_base = OTHER; note = Inverted abasic nucleotide
natagtctacaaaccagttgaan

SEQ ID NO: 240 - RNA, 21 nt, synthetic construct
  source 1..21: mol_type = other RNA
  modified_base 1: mod_base = OTHER; note = Vinyl phosphonate 2'O-methyl-nucleotide phosphorothioate
  modified_base 2: mod_base = OTHER; note = 2'fluoro-nucleotide phosphorothioate
  modified_base 3: mod_base = OTHER; note = 2'O-methyl-nucleotide phosphorothioate
  modified_base 4: mod_base = OTHER; note = 2'O-methyl-nucleotide
  modified_base 5: mod_base = OTHER; note = 2'O-methyl-nucleotide
  modified_base 6: mod_base = OTHER; note = 2'fluoro-nucleotide
  modified_base 7: mod_base = OTHER; note = 2'O-methyl-nucleotide
  modified_base 8: mod_base = OTHER; note = 2'fluoro-nucleotide
  modified_base 9: mod_base = OTHER; note = 2'fluoro-nucleotide
  modified_base 10: mod_base = OTHER; note = 2'O-methyl-nucleotide
  modified_base 11: mod_base = OTHER; note = 2'O-methyl-nucleotide
  modified_base 12: mod_base = OTHER; note = 2'O-methyl-nucleotide
  modified_base 13: mod_base = OTHER; note = 2'O-methyl-nucleotide
  modified_base 14: mod_base = OTHER; note = 2'fluoro-nucleotide
  modified_base 15: mod_base = OTHER; note = 2'O-methyl-nucleotide
  modified_base 16: mod_base = OTHER; note = 2'fluoro-nucleotide
  modified_base 17: mod_base = OTHER; note = 2'O-methyl-nucleotide
  modified_base 18: mod_base = OTHER; note = 2'O-methyl-nucleotide
  modified_base 19: mod_base = OTHER; note = 2'O-methyl-nucleotide phosphorothioate
  modified_base 20: mod_base = OTHER; note = 2'O-methyl-nucleotide phosphorothioate
  modified_base 21: mod_base = OTHER; note = 2'O-methyl-nucleotide
ttcaactggtttgtagactat

SEQ ID NO: 241 - RNA, 23 nt, synthetic construct
  source 1..23: mol_type = other RNA
  modified_base 1: mod_base = OTHER; note = Inverted abasic nucleotide phosphorothioate
  modified_base 2: mod_base = OTHER; note = 2'O-methyl-nucleotide phosphorothioate
  modified_base 3: mod_base = OTHER; note = 2'O-methyl-nucleotide
  modified_base 4: mod_base = OTHER; note = 2'O-methyl-nucleotide
  modified_base 5: mod_base = OTHER; note = 2'O-methyl-nucleotide
  modified_base 6: mod_base = OTHER; note = 2'O-methyl-nucleotide
  modified_base 7: mod_base = OTHER; note = 2'O-methyl-nucleotide
  modified_base 8: mod_base = OTHER; note 15-((3r,5r,7r)-adamantan-1-yl)-N-(6-(((2R,3R,4R,5R)-2-(2,4- dioxo-3,4-dihydropyrimidin-1(2H)-yl)-4-hydroxy-5-(hydroxyme thyl)tetrahydrofuran-3-yl)oxy)hexyl)pentadecanamide nucleotide
  modified_base 9: mod_base = OTHER; note = 2'O-methyl-nucleotide
  modified_base 10: mod_base = OTHER; note = 2'fluoro-nucleotide
  modified_base 11: mod_base = OTHER; note = 2'fluoro-nucleotide
  modified_base 12: mod_base = OTHER; note = 2'fluoro-nucleotide
  modified_base 13: mod_base = OTHER; note = 2'O-methyl-nucleotide
  modified_base 14: mod_base = OTHER; note = 2'O-methyl-nucleotide
  modified_base 15: mod_base = OTHER; note = 2'O-methyl-nucleotide
  modified_base 16: mod_base = OTHER; note = 2'O-methyl-nucleotide
  modified_base 17: mod_base = OTHER; note = 2'O-methyl-nucleotide
  modified_base 18: mod_base = OTHER; note = 2'O-methyl-nucleotide
  modified_base 19: mod_base = OTHER; note = 2'O-methyl-nucleotide
  modified_base 20: mod_base = OTHER; note = 2'O-methyl-nucleotide
  modified_base 21: mod_base = OTHER; note = 2'O-methyl-nucleotide phosphorothioate
  modified_base 22: mod_base = OTHER; note = 2'O-methyl-nucleotide phosphorothioate
  modified_base 23: mod_base = OTHER; note = Inverted abasic nucleotide
natagtctacaaaccagttgaan

SEQ ID NO: 242 - RNA, 21 nt, synthetic construct
  source 1..21: mol_type = other RNA
  modified_base 1: mod_base = OTHER; note = Vinyl phosphonate 2'O-methyl-nucleotide phosphorothioate
  modified_base 2: mod_base = OTHER; note = 2'fluoro-nucleotide phosphorothioate
  modified_base 3: mod_base = OTHER; note = 2'O-methyl-nucleotide phosphorothioate
  modified_base 4: mod_base = OTHER; note = 2'O-methyl-nucleotide
  modified_base 5: mod_base = OTHER; note = 2'O-methyl-nucleotide
  modified_base 6: mod_base = OTHER; note = 2'fluoro-nucleotide
  modified_base 7: mod_base = OTHER; note = 2'O-methyl-nucleotide
  modified_base 8: mod_base = OTHER; note = 2'fluoro-nucleotide
  modified_base 9: mod_base = OTHER; note = 2'fluoro-nucleotide
  modified_base 10: mod_base = OTHER; note = 2'O-methyl-nucleotide
  modified_base 11: mod_base = OTHER; note = 2'O-methyl-nucleotide
  modified_base 12: mod_base = OTHER; note = 2'O-methyl-nucleotide
  modified_base 13: mod_base = OTHER; note = 2'O-methyl-nucleotide
  modified_base 14: mod_base = OTHER; note = 2'fluoro-nucleotide
  modified_base 15: mod_base = OTHER; note = 2'O-methyl-nucleotide
  modified_base 16: mod_base = OTHER; note = 2'fluoro-nucleotide
  modified_base 17: mod_base = OTHER; note = 2'O-methyl-nucleotide
  modified_base 18: mod_base = OTHER; note = 2'O-methyl-nucleotide
  modified_base 19: mod_base = OTHER; note = 2'O-methyl-nucleotide phosphorothioate
  modified_base 20: mod_base = OTHER; note = 2'O-methyl-nucleotide phosphorothioate
  modified_base 21: mod_base = OTHER; note = 2'O-methyl-nucleotide
ttcaactggtttgtagactat

SEQ ID NO: 243 - RNA, 23 nt, synthetic construct
  source 1..23: mol_type = other RNA
  modified_base 1: mod_base = OTHER; note = Inverted abasic nucleotide phosphorothioate
  modified_base 2: mod_base = OTHER; note = 2'O-methyl-nucleotide phosphorothioate
  modified_base 3: mod_base = OTHER; note = 2'O-methyl-nucleotide
  modified_base 4: mod_base = OTHER; note = 2'O-methyl-nucleotide
  modified_base 5: mod_base = OTHER; note = 2'O-methyl-nucleotide
  modified_base 6: mod_base = OTHER; note = 2'O-methyl-nucleotide
  modified_base 7: mod_base = OTHER; note = 2'O-methyl-nucleotide
  modified_base 8: mod_base = OTHER; note (1s,4S)-N-(6-(((2R,3R,4R,5R)-2-(2,4-dioxo-3,4-dihydropyrimi din-1(2H)-yl)-4-hydroxy-5-(hydroxymethyl)tetrahydrofuran-3- yl)oxy)hexyl)-4-heptadecanamidocyclohexane-1-carboxamide nucleotide
  modified_base 9: mod_base = OTHER; note = 2'O-methyl-nucleotide
  modified_base 10: mod_base = OTHER; note = 2'fluoro-nucleotide
  modified_base 11: mod_base = OTHER; note = 2'fluoro-nucleotide
  modified_base 12: mod_base = OTHER; note = 2'fluoro-nucleotide
  modified_base 13: mod_base = OTHER; note = 2'O-methyl-nucleotide
  modified_base 14: mod_base = OTHER; note = 2'O-methyl-nucleotide
  modified_base 15: mod_base = OTHER; note = 2'O-methyl-nucleotide
  modified_base 16: mod_base = OTHER; note = 2'O-methyl-nucleotide
  modified_base 17: mod_base = OTHER; note = 2'O-methyl-nucleotide
  modified_base 18: mod_base = OTHER; note = 2'O-methyl-nucleotide
  modified_base 19: mod_base = OTHER; note = 2'O-methyl-nucleotide
  modified_base 20: mod_base = OTHER; note = 2'O-methyl-nucleotide
  modified_base 21: mod_base = OTHER; note = 2'O-methyl-nucleotide phosphorothioate
  modified_base 22: mod_base = OTHER; note = 2'O-methyl-nucleotide phosphorothioate
  modified_base 23: mod_base = OTHER; note = Inverted abasic nucleotide
natagtctacaaaccagttgaan

SEQ ID NO: 244 - RNA, 21 nt, synthetic construct
  source 1..21: mol_type = other RNA
  modified_base 1: mod_base = OTHER; note = Vinyl phosphonate 2'O-methyl-nucleotide phosphorothioate
  modified_base 2: mod_base = OTHER; note = 2'fluoro-nucleotide phosphorothioate
  modified_base 3: mod_base = OTHER; note = 2'O-methyl-nucleotide phosphorothioate
  modified_base 4: mod_base = OTHER; note = 2'O-methyl-nucleotide
  modified_base 5: mod_base = OTHER; note = 2'O-methyl-nucleotide
  modified_base 6: mod_base = OTHER; note = 2'fluoro-nucleotide
  modified_base 7: mod_base = OTHER; note = 2'O-methyl-nucleotide
  modified_base 8: mod_base = OTHER; note = 2'fluoro-nucleotide
  modified_base 9: mod_base = OTHER; note = 2'fluoro-nucleotide
  modified_base 10: mod_base = OTHER; note = 2'O-methyl-nucleotide
  modified_base 11: mod_base = OTHER; note = 2'O-methyl-nucleotide
  modified_base 12: mod_base = OTHER; note = 2'O-methyl-nucleotide
  modified_base 13: mod_base = OTHER; note = 2'O-methyl-nucleotide
  modified_base 14: mod_base = OTHER; note = 2'fluoro-nucleotide
  modified_base 15: mod_base = OTHER; note = 2'O-methyl-nucleotide
  modified_base 16: mod_base = OTHER; note = 2'fluoro-nucleotide
  modified_base 17: mod_base = OTHER; note = 2'O-methyl-nucleotide
  modified_base 18: mod_base = OTHER; note = 2'O-methyl-nucleotide
  modified_base 19: mod_base = OTHER; note = 2'O-methyl-nucleotide phosphorothioate
  modified_base 20: mod_base = OTHER; note = 2'O-methyl-nucleotide phosphorothioate
  modified_base 21: mod_base = OTHER; note = 2'O-methyl-nucleotide
ttcaactggtttgtagactat

SEQ ID NO: 245-246 - skipped (2 entries)

SEQ ID NO: 247 - RNA, 23 nt, synthetic construct
  source 1..23: mol_type = other RNA
  modified_base 1: mod_base = OTHER; note = Inverted abasic nucleotide phosphorothioate
  modified_base 2: mod_base = OTHER; note = 2'O-methyl-nucleotide phosphorothioate
  modified_base 3: mod_base = OTHER; note = 2'O-methyl-nucleotide
  modified_base 4: mod_base = OTHER; note = 2'O-methyl-nucleotide
  modified_base 5: mod_base = OTHER; note = 2'O-methyl-nucleotide
  modified_base 6: mod_base = OTHER; note = 2'O-methyl-nucleotide
  modified_base 7: mod_base = OTHER; note = 2'O-methyl-nucleotide
  modified_base 8: mod_base = OTHER; note N-(6-(((2R,3R,4R,5R)-2-(2,4-dioxo-3,4-dihydropyrimidin-1(2H )-yl)-4-hydroxy-5-(hydroxymethyl)tetrahydrofuran-3-yl)oxy)h exyl)-16-(((2S)-1,7,7-trimethylbicyclo[2.2.1]heptan-2-yl)ox y)hexadecanamide nucleotide
  modified_base 9: mod_base = OTHER; note = 2'O-methyl-nucleotide
  modified_base 10: mod_base = OTHER; note = 2'fluoro-nucleotide
  modified_base 11: mod_base = OTHER; note = 2'fluoro-nucleotide
  modified_base 12: mod_base = OTHER; note = 2'fluoro-nucleotide
  modified_base 13: mod_base = OTHER; note = 2'O-methyl-nucleotide
  modified_base 14: mod_base = OTHER; note = 2'O-methyl-nucleotide
  modified_base 15: mod_base = OTHER; note = 2'O-methyl-nucleotide
  modified_base 16: mod_base = OTHER; note = 2'O-methyl-nucleotide
  modified_base 17: mod_base = OTHER; note = 2'O-methyl-nucleotide
  modified_base 18: mod_base = OTHER; note = 2'O-methyl-nucleotide
  modified_base 19: mod_base = OTHER; note = 2'O-methyl-nucleotide
  modified_base 20: mod_base = OTHER; note = 2'O-methyl-nucleotide
  modified_base 21: mod_base = OTHER; note = 2'O-methyl-nucleotide phosphorothioate
  modified_base 22: mod_base = OTHER; note = 2'O-methyl-nucleotide phosphorothioate
  modified_base 23: mod_base = OTHER; note = Inverted abasic nucleotide
natagtctacaaaccagttgaan

SEQ ID NO: 248 - RNA, 21 nt, synthetic construct
  source 1..21: mol_type = other RNA
  modified_base 1: mod_base = OTHER; note = Vinyl phosphonate 2'O-methyl-nucleotide phosphorothioate
  modified_base 2: mod_base = OTHER; note = 2'fluoro-nucleotide phosphorothioate
  modified_base 3: mod_base = OTHER; note = 2'O-methyl-nucleotide phosphorothioate
  modified_base 4: mod_base = OTHER; note = 2'O-methyl-nucleotide
  modified_base 5: mod_base = OTHER; note = 2'O-methyl-nucleotide
  modified_base 6: mod_base = OTHER; note = 2'fluoro-nucleotide
  modified_base 7: mod_base = OTHER; note = 2'O-methyl-nucleotide
  modified_base 8: mod_base = OTHER; note = 2'fluoro-nucleotide
  modified_base 9: mod_base = OTHER; note = 2'fluoro-nucleotide
  modified_base 10: mod_base = OTHER; note = 2'O-methyl-nucleotide
  modified_base 11: mod_base = OTHER; note = 2'O-methyl-nucleotide
  modified_base 12: mod_base = OTHER; note = 2'O-methyl-nucleotide
  modified_base 13: mod_base = OTHER; note = 2'O-methyl-nucleotide
  modified_base 14: mod_base = OTHER; note = 2'fluoro-nucleotide
  modified_base 15: mod_base = OTHER; note = 2'O-methyl-nucleotide
  modified_base 16: mod_base = OTHER; note = 2'fluoro-nucleotide
  modified_base 17: mod_base = OTHER; note = 2'O-methyl-nucleotide
  modified_base 18: mod_base = OTHER; note = 2'O-methyl-nucleotide
  modified_base 19: mod_base = OTHER; note = 2'O-methyl-nucleotide phosphorothioate
  modified_base 20: mod_base = OTHER; note = 2'O-methyl-nucleotide phosphorothioate
  modified_base 21: mod_base = OTHER; note = 2'O-methyl-nucleotide
ttcaactggtttgtagactat

SEQ ID NO: 249 - RNA, 23 nt, synthetic construct
  source 1..23: mol_type = other RNA
  modified_base 1: mod_base = OTHER; note = Inverted abasic nucleotide phosphorothioate
  modified_base 2: mod_base = OTHER; note = 2'O-methyl-nucleotide phosphorothioate
  modified_base 3: mod_base = OTHER; note = 2'O-methyl-nucleotide
  modified_base 4: mod_base = OTHER; note = 2'O-methyl-nucleotide
  modified_base 5: mod_base = OTHER; note = 2'O-methyl-nucleotide
  modified_base 6: mod_base = OTHER; note = 2'O-methyl-nucleotide
  modified_base 7: mod_base = OTHER; note = 2'O-methyl-nucleotide
  modified_base 8: mod_base = OTHER; note N-(6-(((2R,3R,4R,5R)-2-(2,4-dioxo-3,4-dihydropyrimidin-1(2H )-yl)-4-hydroxy-5-(hydroxymethyl)tetrahydrofuran-3-yl)oxy)h exyl)-16-(((1R,2S,5R)-2-isopropyl-5-methylcyclohexyl)oxy)he xadecanamide nucleotide
  modified_base 9: mod_base = OTHER; note = 2'O-methyl-nucleotide
  modified_base 10: mod_base = OTHER; note = 2'fluoro-nucleotide
  modified_base 11: mod_base = OTHER; note = 2'fluoro-nucleotide
  modified_base 12: mod_base = OTHER; note = 2'fluoro-nucleotide
  modified_base 13: mod_base = OTHER; note = 2'O-methyl-nucleotide
  modified_base 14: mod_base = OTHER; note = 2'O-methyl-nucleotide
  modified_base 15: mod_base = OTHER; note = 2'O-methyl-nucleotide
  modified_base 16: mod_base = OTHER; note = 2'O-methyl-nucleotide
  modified_base 17: mod_base = OTHER; note = 2'O-methyl-nucleotide
  modified_base 18: mod_base = OTHER; note = 2'O-methyl-nucleotide
  modified_base 19: mod_base = OTHER; note = 2'O-methyl-nucleotide
  modified_base 20: mod_base = OTHER; note = 2'O-methyl-nucleotide
  modified_base 21: mod_base = OTHER; note = 2'O-methyl-nucleotide phosphorothioate
  modified_base 22: mod_base = OTHER; note = 2'O-methyl-nucleotide phosphorothioate
  modified_base 23: mod_base = OTHER; note = Inverted abasic nucleotide
natagtctacaaaccagttgaan

SEQ ID NO: 250 - RNA, 21 nt, synthetic construct
  source 1..21: mol_type = other RNA
  modified_base 1: mod_base = OTHER; note = Vinyl phosphonate 2'O-methyl-nucleotide phosphorothioate
  modified_base 2: mod_base = OTHER; note = 2'fluoro-nucleotide phosphorothioate
  modified_base 3: mod_base = OTHER; note = 2'O-methyl-nucleotide phosphorothioate
  modified_base 4: mod_base = OTHER; note = 2'O-methyl-nucleotide
  modified_base 5: mod_base = OTHER; note = 2'O-methyl-nucleotide
  modified_base 6: mod_base = OTHER; note = 2'fluoro-nucleotide
  modified_base 7: mod_base = OTHER; note = 2'O-methyl-nucleotide
  modified_base 8: mod_base = OTHER; note = 2'fluoro-nucleotide
  modified_base 9: mod_base = OTHER; note = 2'fluoro-nucleotide
  modified_base 10: mod_base = OTHER; note = 2'O-methyl-nucleotide
  modified_base 11: mod_base = OTHER; note = 2'O-methyl-nucleotide
  modified_base 12: mod_base = OTHER; note = 2'O-methyl-nucleotide
  modified_base 13: mod_base = OTHER; note = 2'O-methyl-nucleotide
  modified_base 14: mod_base = OTHER; note = 2'fluoro-nucleotide
  modified_base 15: mod_base = OTHER; note = 2'O-methyl-nucleotide
  modified_base 16: mod_base = OTHER; note = 2'fluoro-nucleotide
  modified_base 17: mod_base = OTHER; note = 2'O-methyl-nucleotide
  modified_base 18: mod_base = OTHER; note = 2'O-methyl-nucleotide
  modified_base 19: mod_base = OTHER; note = 2'O-methyl-nucleotide phosphorothioate
  modified_base 20: mod_base = OTHER; note = 2'O-methyl-nucleotide phosphorothioate
  modified_base 21: mod_base = OTHER; note = 2'O-methyl-nucleotide
ttcaactggtttgtagactat

SEQ ID NO: 251-252 - skipped (2 entries)

SEQ ID NO: 253 - RNA, 23 nt, synthetic construct
  source 1..23: mol_type = other RNA
  modified_base 1: mod_base = OTHER; note = Inverted abasic nucleotide phosphorothioate
  modified_base 2: mod_base = OTHER; note = 2'O-methyl-nucleotide phosphorothioate
  modified_base 3: mod_base = OTHER; note = 2'O-methyl-nucleotide
  modified_base 4: mod_base = OTHER; note = 2'O-methyl-nucleotide
  modified_base 5: mod_base = OTHER; note = 2'O-methyl-nucleotide
  modified_base 6: mod_base = OTHER; note = 2'O-methyl-nucleotide
  modified_base 7: mod_base = OTHER; note = 2'O-methyl-nucleotide
  modified_base 8: mod_base = OTHER; note = 2'O-methyl-nucleotide
  modified_base 9: mod_base = OTHER; note = 2'O-methyl-nucleotide
  modified_base 10: mod_base = OTHER; note = 2'fluoro-nucleotide
  modified_base 11: mod_base = OTHER; note = 2'fluoro-nucleotide
  modified_base 12: mod_base = OTHER; note = 2'fluoro-nucleotide
  modified_base 13: mod_base = OTHER; note = 2'O-methyl-nucleotide
  modified_base 14: mod_base = OTHER; note = 2'O-methyl-nucleotide
  modified_base 15: mod_base = OTHER; note = 2'O-methyl-nucleotide
  modified_base 16: mod_base = OTHER; note = 2'O-methyl-nucleotide
  modified_base 17: mod_base = OTHER; note = 2'O-methyl-nucleotide
  modified_base 18: mod_base = OTHER; note = 2'O-methyl-nucleotide
  modified_base 19: mod_base = OTHER; note = 2'O-methyl-nucleotide
  modified_base 20: mod_base = OTHER; note = 2'O-methyl-nucleotide
  modified_base 21: mod_base = OTHER; note = 2'O-methyl-nucleotide phosphorothioate
  modified_base 22: mod_base = OTHER; note = 2'O-methyl-nucleotide phosphorothioate
  modified_base 23: mod_base = OTHER; note = Inverted abasic (1s,4s)-4-heptadecanamido-N-heptylcyclohexane-1-carboxamide nucleotide
natagtctacaaaccagttgaan

SEQ ID NO: 254 - RNA, 21 nt, synthetic construct
  source 1..21: mol_type = other RNA
  modified_base 1: mod_base = OTHER; note = Vinyl phosphonate 2'O-methyl-nucleotide phosphorothioate
  modified_base 2: mod_base = OTHER; note = 2'fluoro-nucleotide phosphorothioate
  modified_base 3: mod_base = OTHER; note = 2'O-methyl-nucleotide phosphorothioate
  modified_base 4: mod_base = OTHER; note = 2'O-methyl-nucleotide
  modified_base 5: mod_base = OTHER; note = 2'O-methyl-nucleotide
  modified_base 6: mod_base = OTHER; note = 2'fluoro-nucleotide
  modified_base 7: mod_base = OTHER; note = 2'O-methyl-nucleotide
  modified_base 8: mod_base = OTHER; note = 2'fluoro-nucleotide
  modified_base 9: mod_base = OTHER; note = 2'fluoro-nucleotide
  modified_base 10: mod_base = OTHER; note = 2'O-methyl-nucleotide
  modified_base 11: mod_base = OTHER; note = 2'O-methyl-nucleotide
  modified_base 12: mod_base = OTHER; note = 2'O-methyl-nucleotide
  modified_base 13: mod_base = OTHER; note = 2'O-methyl-nucleotide
  modified_base 14: mod_base = OTHER; note = 2'fluoro-nucleotide
  modified_base 15: mod_base = OTHER; note = 2'O-methyl-nucleotide
  modified_base 16: mod_base = OTHER; note = 2'fluoro-nucleotide
  modified_base 17: mod_base = OTHER; note = 2'O-methyl-nucleotide
  modified_base 18: mod_base = OTHER; note = 2'O-methyl-nucleotide
  modified_base 19: mod_base = OTHER; note = 2'O-methyl-nucleotide phosphorothioate
  modified_base 20: mod_base = OTHER; note = 2'O-methyl-nucleotide phosphorothioate
  modified_base 21: mod_base = OTHER; note = 2'O-methyl-nucleotide
ttcaactggtttgtagactat

SEQ ID NO: 255 - RNA, 23 nt, synthetic construct
  source 1..23: mol_type = other RNA
  modified_base 1: mod_base = OTHER; note = Inverted abasic nucleotide phosphorothioate
  modified_base 2: mod_base = OTHER; note = 2'O-methyl-nucleotide phosphorothioate
  modified_base 3: mod_base = OTHER; note = 2'O-methyl-nucleotide
  modified_base 4: mod_base = OTHER; note = 2'O-methyl-nucleotide
  modified_base 5: mod_base = OTHER; note = 2'O-methyl-nucleotide
  modified_base 6: mod_base = OTHER; note = 2'O-methyl-nucleotide
  modified_base 7: mod_base = OTHER; note = 2'O-methyl-nucleotide
  modified_base 8: mod_base = OTHER; note = 2'O-methyl-nucleotide
  modified_base 9: mod_base = OTHER; note = 2'O-methyl-nucleotide
  modified_base 10: mod_base = OTHER; note = 2'fluoro-nucleotide
  modified_base 11: mod_base = OTHER; note = 2'fluoro-nucleotide
  modified_base 12: mod_base = OTHER; note = 2'fluoro-nucleotide
  modified_base 13: mod_base = OTHER; note = 2'O-methyl-nucleotide
  modified_base 14: mod_base = OTHER; note = 2'O-methyl-nucleotide
  modified_base 15: mod_base = OTHER; note = 2'O-methyl-nucleotide
  modified_base 16: mod_base = OTHER; note = 2'O-methyl-nucleotide
  modified_base 17: mod_base = OTHER; note = 2'O-methyl-nucleotide
  modified_base 18: mod_base = OTHER; note = 2'O-methyl-nucleotide
  modified_base 19: mod_base = OTHER; note = 2'O-methyl-nucleotide
  modified_base 20: mod_base = OTHER; note = 2'O-methyl-nucleotide
  modified_base 21: mod_base = OTHER; note = 2'O-methyl-nucleotide phosphorothioate
  modified_base 22: mod_base = OTHER; note = 2'O-methyl-nucleotide phosphorothioate
  modified_base 23: mod_base = OTHER; note = Inverted abasic (1S,2R,4S)-1,7,7-trimethylbicyclo[2.2.1]heptan-2-yl 16-(heptylamino)-16-oxohexadecanoate nucleotide
natagtctacaaaccagttgaan

SEQ ID NO: 256 - RNA, 21 nt, synthetic construct
  source 1..21: mol_type = other RNA
  modified_base 1: mod_base = OTHER; note = Vinyl phosphonate 2'O-methyl-nucleotide phosphorothioate
  modified_base 2: mod_base = OTHER; note = 2'fluoro-nucleotide phosphorothioate
  modified_base 3: mod_base = OTHER; note = 2'O-methyl-nucleotide phosphorothioate
  modified_base 4: mod_base = OTHER; note = 2'O-methyl-nucleotide
  modified_base 5: mod_base = OTHER; note = 2'O-methyl-nucleotide
  modified_base 6: mod_base = OTHER; note = 2'fluoro-nucleotide
  modified_base 7: mod_base = OTHER; note = 2'O-methyl-nucleotide
  modified_base 8: mod_base = OTHER; note = 2'fluoro-nucleotide
  modified_base 9: mod_base = OTHER; note = 2'fluoro-nucleotide
  modified_base 10: mod_base = OTHER; note = 2'O-methyl-nucleotide
  modified_base 11: mod_base = OTHER; note = 2'O-methyl-nucleotide
  modified_base 12: mod_base = OTHER; note = 2'O-methyl-nucleotide
  modified_base 13: mod_base = OTHER; note = 2'O-methyl-nucleotide
  modified_base 14: mod_base = OTHER; note = 2'fluoro-nucleotide
  modified_base 15: mod_base = OTHER; note = 2'O-methyl-nucleotide
  modified_base 16: mod_base = OTHER; note = 2'fluoro-nucleotide
  modified_base 17: mod_base = OTHER; note = 2'O-methyl-nucleotide
  modified_base 18: mod_base = OTHER; note = 2'O-methyl-nucleotide
  modified_base 19: mod_base = OTHER; note = 2'O-methyl-nucleotide phosphorothioate
  modified_base 20: mod_base = OTHER; note = 2'O-methyl-nucleotide phosphorothioate
  modified_base 21: mod_base = OTHER; note = 2'O-methyl-nucleotide
ttcaactggtttgtagactat

SEQ ID NO: 257 - RNA, 23 nt, synthetic construct
  source 1..23: mol_type = other RNA
  modified_base 1: mod_base = OTHER; note = Inverted abasic nucleotide phosphorothioate
  modified_base 2: mod_base = OTHER; note = 2'O-methyl-nucleotide phosphorothioate
  modified_base 3: mod_base = OTHER; note = 2'O-methyl-nucleotide
  modified_base 4: mod_base = OTHER; note = 2'O-methyl-nucleotide
  modified_base 5: mod_base = OTHER; note = 2'O-methyl-nucleotide
  modified_base 6: mod_base = OTHER; note = 2'O-methyl-nucleotide
  modified_base 7: mod_base = OTHER; note = 2'O-methyl-nucleotide
  modified_base 8: mod_base = OTHER; note = 2'O-methyl-nucleotide
  modified_base 9: mod_base = OTHER; note = 2'O-methyl-nucleotide
  modified_base 10: mod_base = OTHER; note = 2'fluoro-nucleotide
  modified_base 11: mod_base = OTHER; note = 2'fluoro-nucleotide
  modified_base 12: mod_base = OTHER; note = 2'fluoro-nucleotide
  modified_base 13: mod_base = OTHER; note = 2'O-methyl-nucleotide
  modified_base 14: mod_base = OTHER; note = 2'O-methyl-nucleotide
  modified_base 15: mod_base = OTHER; note = 2'O-methyl-nucleotide
  modified_base 16: mod_base = OTHER; note = 2'O-methyl-nucleotide
  modified_base 17: mod_base = OTHER; note = 2'O-methyl-nucleotide
  modified_base 18: mod_base = OTHER; note = 2'O-methyl-nucleotide
  modified_base 19: mod_base = OTHER; note = 2'O-methyl-nucleotide
  modified_base 20: mod_base = OTHER; note = 2'O-methyl-nucleotide
  modified_base 21: mod_base = OTHER; note = 2'O-methyl-nucleotide phosphorothioate
  modified_base 22: mod_base = OTHER; note = 2'O-methyl-nucleotide phosphorothioate
  modified_base 23: mod_base = OTHER; note = Inverted abasic (1R,2S,5R)-2-isopropyl-5-methylcyclohexyl 16-(heptylamino)-16-oxohexadecanoate nucleotide
natagtctacaaaccagttgaan

SEQ ID NO: 258 - RNA, 21 nt, synthetic construct
  source 1..21: mol_type = other RNA
  modified_base 1: mod_base = OTHER; note = Vinyl phosphonate 2'O-methyl-nucleotide phosphorothioate
  modified_base 2: mod_base = OTHER; note = 2'fluoro-nucleotide phosphorothioate
  modified_base 3: mod_base = OTHER; note = 2'O-methyl-nucleotide phosphorothioate
  modified_base 4: mod_base = OTHER; note = 2'O-methyl-nucleotide
  modified_base 5: mod_base = OTHER; note = 2'O-methyl-nucleotide
  modified_base 6: mod_base = OTHER; note = 2'fluoro-nucleotide
  modified_base 7: mod_base = OTHER; note = 2'O-methyl-nucleotide
  modified_base 8: mod_base = OTHER; note = 2'fluoro-nucleotide
  modified_base 9: mod_base = OTHER; note = 2'fluoro-nucleotide
  modified_base 10: mod_base = OTHER; note = 2'O-methyl-nucleotide
  modified_base 11: mod_base = OTHER; note = 2'O-methyl-nucleotide
  modified_base 12: mod_base = OTHER; note = 2'O-methyl-nucleotide
  modified_base 13: mod_base = OTHER; note = 2'O-methyl-nucleotide
  modified_base 14: mod_base = OTHER; note = 2'fluoro-nucleotide
  modified_base 15: mod_base = OTHER; note = 2'O-methyl-nucleotide
  modified_base 16: mod_base = OTHER; note = 2'fluoro-nucleotide
  modified_base 17: mod_base = OTHER; note = 2'O-methyl-nucleotide
  modified_base 18: mod_base = OTHER; note = 2'O-methyl-nucleotide
  modified_base 19: mod_base = OTHER; note = 2'O-methyl-nucleotide phosphorothioate
  modified_base 20: mod_base = OTHER; note = 2'O-methyl-nucleotide phosphorothioate
  modified_base 21: mod_base = OTHER; note = 2'O-methyl-nucleotide
ttcaactggtttgtagactat

SEQ ID NO: 259-260 - skipped (2 entries)

SEQ ID NO: 261 - RNA, 23 nt, synthetic construct
  source 1..23: mol_type = other RNA
  modified_base 1: mod_base = OTHER; note = Inverted abasic nucleotide phosphorothioate
  modified_base 2: mod_base = OTHER; note = 2'O-methyl-nucleotide phosphorothioate
  modified_base 3: mod_base = OTHER; note = 2'O-methyl-nucleotide
  modified_base 4: mod_base = OTHER; note = 2'O-methyl-nucleotide
  modified_base 5: mod_base = OTHER; note = 2'O-methyl-nucleotide
  modified_base 6: mod_base = OTHER; note = 2'O-methyl-nucleotide
  modified_base 7: mod_base = OTHER; note = 2'O-methyl-nucleotide
  modified_base 8: mod_base = OTHER; note 1-((2R,3R,4R,5R)-3-((15-((3r,5r,7r)-adamantan-1-yl)pentadec yl)oxy)-4-hydroxy-5-(hydroxymethyl)tetrahydrofuran-2-yl)pyr imidine-2,4(1H,3H)-dione nucleotide
  modified_base 9: mod_base = OTHER; note = 2'O-methyl-nucleotide
  modified_base 10: mod_base = OTHER; note = 2'fluoro-nucleotide
  modified_base 11: mod_base = OTHER; note = 2'fluoro-nucleotide
  modified_base 12: mod_base = OTHER; note = 2'fluoro-nucleotide
  modified_base 13: mod_base = OTHER; note = 2'O-methyl-nucleotide
  modified_base 14: mod_base = OTHER; note = 2'O-methyl-nucleotide
  modified_base 15: mod_base = OTHER; note = 2'O-methyl-nucleotide
  modified_base 16: mod_base = OTHER; note = 2'O-methyl-nucleotide
  modified_base 17: mod_base = OTHER; note = 2'O-methyl-nucleotide
  modified_base 18: mod_base = OTHER; note = 2'O-methyl-nucleotide
  modified_base 19: mod_base = OTHER; note = 2'O-methyl-nucleotide
  modified_base 20: mod_base = OTHER; note = 2'O-methyl-nucleotide
  modified_base 21: mod_base = OTHER; note = 2'O-methyl-nucleotide phosphorothioate
  modified_base 22: mod_base = OTHER; note = 2'O-methyl-nucleotide phosphorothioate
  modified_base 23: mod_base = OTHER; note = Inverted abasic nucleotide
natagtctacaaaccagttgaan

SEQ ID NO: 262 - RNA, 21 nt, synthetic construct
  source 1..21: mol_type = other RNA
  modified_base 1: mod_base = OTHER; note = Vinyl phosphonate 2'O-methyl-nucleotide phosphorothioate
  modified_base 2: mod_base = OTHER; note = 2'fluoro-nucleotide phosphorothioate
  modified_base 3: mod_base = OTHER; note = 2'O-methyl-nucleotide
  modified_base 4: mod_base = OTHER; note = 2'O-methyl-nucleotide
  modified_base 5: mod_base = OTHER; note = 2'O-methyl-nucleotide
  modified_base 6: mod_base = OTHER; note = 2'fluoro-nucleotide
  modified_base 7: mod_base = OTHER; note = 2'O-methyl-nucleotide
  modified_base 8: mod_base = OTHER; note = 2'fluoro-nucleotide
  modified_base 9: mod_base = OTHER; note = 2'fluoro-nucleotide
  modified_base 10: mod_base = OTHER; note = 2'O-methyl-nucleotide
  modified_base 11: mod_base = OTHER; note = 2'O-methyl-nucleotide
  modified_base 12: mod_base = OTHER; note = 2'O-methyl-nucleotide
  modified_base 13: mod_base = OTHER; note = 2'O-methyl-nucleotide
  modified_base 14: mod_base = OTHER; note = 2'fluoro-nucleotide
  modified_base 15: mod_base = OTHER; note = 2'O-methyl-nucleotide
  modified_base 16: mod_base = OTHER; note = 2'fluoro-nucleotide
  modified_base 17: mod_base = OTHER; note = 2'O-methyl-nucleotide
  modified_base 18: mod_base = OTHER; note = 2'O-methyl-nucleotide
  modified_base 19: mod_base = OTHER; note = 2'O-methyl-nucleotide phosphorothioate
  modified_base 20: mod_base = OTHER; note = 2'O-methyl-nucleotide phosphorothioate
  modified_base 21: mod_base = OTHER; note = 2'O-methyl-nucleotide
ttcaactggtttgtagactat

SEQ ID NO: 263 - RNA, 23 nt, synthetic construct
  source 1..23: mol_type = other RNA
  modified_base 1: mod_base = OTHER; note = Inverted abasic nucleotide phosphorothioate
  modified_base 2: mod_base = OTHER; note = 2'O-methyl-nucleotide phosphorothioate
  modified_base 3: mod_base = OTHER; note = 2'O-methyl-nucleotide
  modified_base 4: mod_base = OTHER; note = 2'O-methyl-nucleotide
  modified_base 5: mod_base = OTHER; note = 2'O-methyl-nucleotide
  modified_base 6: mod_base = OTHER; note = 2'O-methyl-nucleotide
  modified_base 7: mod_base = OTHER; note = 2'O-methyl-nucleotide
  modified_base 8: mod_base = OTHER; note (2R,3R,4R,5R)-2-(2,4-dioxo-3,4-dihydropyrimidin-1(2H)-yl)-4 -hydroxy-5-(hydroxymethyl)tetrahydrofuran-3-yl hexadecylcarbamate nucleotide
  modified_base 9: mod_base = OTHER; note = 2'O-methyl-nucleotide
  modified_base 10: mod_base = OTHER; note = 2'fluoro-nucleotide
  modified_base 11: mod_base = OTHER; note = 2'fluoro-nucleotide
  modified_base 12: mod_base = OTHER; note = 2'fluoro-nucleotide
  modified_base 13: mod_base = OTHER; note = 2'O-methyl-nucleotide
  modified_base 14: mod_base = OTHER; note = 2'O-methyl-nucleotide
  modified_base 15: mod_base = OTHER; note = 2'O-methyl-nucleotide
  modified_base 16: mod_base = OTHER; note = 2'O-methyl-nucleotide
  modified_base 17: mod_base = OTHER; note = 2'O-methyl-nucleotide
  modified_base 18: mod_base = OTHER; note = 2'O-methyl-nucleotide
  modified_base 19: mod_base = OTHER; note = 2'O-methyl-nucleotide
  modified_base 20: mod_base = OTHER; note = 2'O-methyl-nucleotide
  modified_base 21: mod_base = OTHER; note = 2'O-methyl-nucleotide phosphorothioate
  modified_base 22: mod_base = OTHER; note = 2'O-methyl-nucleotide phosphorothioate
  modified_base 23: mod_base = OTHER; note = Inverted abasic nucleotide
natagtctacaaaccagttgaan

SEQ ID NO: 264 - RNA, 21 nt, synthetic construct
  source 1..21: mol_type = other RNA
  modified_base 1: mod_base = OTHER; note = Vinyl phosphonate 2'O-methyl-nucleotide phosphorothioate
  modified_base 2: mod_base = OTHER; note = 2'fluoro-nucleotide phosphorothioate
  modified_base 3: mod_base = OTHER; note = 2'O-methyl-nucleotide phosphorothioate
  modified_base 4: mod_base = OTHER; note = 2'O-methyl-nucleotide
  modified_base 5: mod_base = OTHER; note = 2'O-methyl-nucleotide
  modified_base 6: mod_base = OTHER; note = 2'fluoro-nucleotide
  modified_base 7: mod_base = OTHER; note = 2'O-methyl-nucleotide
  modified_base 8: mod_base = OTHER; note = 2'fluoro-nucleotide
  modified_base 9: mod_base = OTHER; note = 2'fluoro-nucleotide
  modified_base 10: mod_base = OTHER; note = 2'O-methyl-nucleotide
  modified_base 11: mod_base = OTHER; note = 2'O-methyl-nucleotide
  modified_base 12: mod_base = OTHER; note = 2'O-methyl-nucleotide
  modified_base 13: mod_base = OTHER; note = 2'O-methyl-nucleotide
  modified_base 14: mod_base = OTHER; note = 2'fluoro-nucleotide
  modified_base 15: mod_base = OTHER; note = 2'O-methyl-nucleotide
  modified_base 16: mod_base = OTHER; note = 2'fluoro-nucleotide
  modified_base 17: mod_base = OTHER; note = 2'O-methyl-nucleotide
  modified_base 18: mod_base = OTHER; note = 2'O-methyl-nucleotide
  modified_base 19: mod_base = OTHER; note = 2'O-methyl-nucleotide phosphorothioate
  modified_base 20: mod_base = OTHER; note = 2'O-methyl-nucleotide phosphorothioate
  modified_base 21: mod_base = OTHER; note = 2'O-methyl-nucleotide
ttcaactggtttgtagactat

SEQ ID NO: 265 - RNA, 23 nt, synthetic construct
  source 1..23: mol_type = other RNA
  modified_base 1: mod_base = OTHER; note = Inverted abasic nucleotide phosphorothioate
  modified_base 2: mod_base = OTHER; note = 2'O-methyl-nucleotide phosphorothioate
  modified_base 3: mod_base = OTHER; note 3-(((2R,3R,4R,5R)-2-(2,4-dioxo-3,4-dihydropyrimidin-1(2H)-y l)-4-hydroxy-5-(hydroxymethyl)tetrahydrofuran-3-yl)oxy)-N-h exadecylpropanamide nucleotide
  modified_base 4: mod_base = OTHER; note = 2'O-methyl-nucleotide
  modified_base 5: mod_base = OTHER; note = 2'O-methyl-nucleotide
  modified_base 6: mod_base = OTHER; note = 2'O-methyl-nucleotide
  modified_base 7: mod_base = OTHER; note = 2'O-methyl-nucleotide
  modified_base 8: mod_base = OTHER; note = 2'O-methyl-nucleotide
  modified_base 9: mod_base = OTHER; note = 2'O-methyl-nucleotide
  modified_base 10: mod_base = OTHER; note = 2'fluoro-nucleotide
  modified_base 11: mod_base = OTHER; note = 2'fluoro-nucleotide
  modified_base 12: mod_base = OTHER; note = 2'fluoro-nucleotide
  modified_base 13: mod_base = OTHER; note = 2'O-methyl-nucleotide
  modified_base 14: mod_base = OTHER; note = 2'O-methyl-nucleotide
  modified_base 15: mod_base = OTHER; note = 2'O-methyl-nucleotide
  modified_base 16: mod_base = OTHER; note = 2'O-methyl-nucleotide
  modified_base 17: mod_base = OTHER; note = 2'O-methyl-nucleotide
  modified_base 18: mod_base = OTHER; note = 2'O-methyl-nucleotide
  modified_base 19: mod_base = OTHER; note = 2'O-methyl-nucleotide
  modified_base 20: mod_base = OTHER; note = 2'O-methyl-nucleotide
  modified_base 21: mod_base = OTHER; note = 2'O-methyl-nucleotide phosphorothioate
  modified_base 22: mod_base = OTHER; note = 2'O-methyl-nucleotide phosphorothioate
  modified_base 23: mod_base = OTHER; note = Inverted abasic nucleotide
natagtctacaaaccagttgaan

SEQ ID NO: 266 - RNA, 21 nt, synthetic construct
  source 1..21: mol_type = other RNA
  modified_base 1: mod_base = OTHER; note = Vinyl phosphonate 2'O-methyl-nucleotide phosphorothioate
  modified_base 2: mod_base = OTHER; note = 2'fluoro-nucleotide phosphorothioate
  modified_base 3: mod_base = OTHER; note = 2'O-methyl-nucleotide phosphorothioate
  modified_base 4: mod_base = OTHER; note = 2'O-methyl-nucleotide
  modified_base 5: mod_base = OTHER; note = 2'O-methyl-nucleotide
  modified_base 6: mod_base = OTHER; note = 2'fluoro-nucleotide
  modified_base 7: mod_base = OTHER; note = 2'O-methyl-nucleotide
  modified_base 8: mod_base = OTHER; note = 2'fluoro-nucleotide
  modified_base 9: mod_base = OTHER; note = 2'fluoro-nucleotide
  modified_base 10: mod_base = OTHER; note = 2'O-methyl-nucleotide
  modified_base 11: mod_base = OTHER; note = 2'O-methyl-nucleotide
  modified_base 12: mod_base = OTHER; note = 2'O-methyl-nucleotide
  modified_base 13: mod_base = OTHER; note = 2'O-methyl-nucleotide
  modified_base 14: mod_base = OTHER; note = 2'fluoro-nucleotide
  modified_base 15: mod_base = OTHER; note = 2'O-methyl-nucleotide
  modified_base 16: mod_base = OTHER; note = 2'fluoro-nucleotide
  modified_base 17: mod_base = OTHER; note = 2'O-methyl-nucleotide
  modified_base 18: mod_base = OTHER; note = 2'O-methyl-nucleotide
  modified_base 19: mod_base = OTHER; note = 2'O-methyl-nucleotide phosphorothioate
  modified_base 20: mod_base = OTHER; note = 2'O-methyl-nucleotide phosphorothioate
  modified_base 21: mod_base = OTHER; note = 2'O-methyl-nucleotide
ttcaactggtttgtagactat

SEQ ID NO: 267 - RNA, 23 nt, synthetic construct
  source 1..23: mol_type = other RNA
  modified_base 1: mod_base = OTHER; note = Inverted abasic nucleotide phosphorothioate
  modified_base 2: mod_base = OTHER; note = 2'O-methyl-nucleotide phosphorothioate
  modified_base 3: mod_base = OTHER; note = 2'O-methyl-nucleotide
  modified_base 4: mod_base = OTHER; note = 2'O-methyl-nucleotide
  modified_base 5: mod_base = OTHER; note = 2'O-methyl-nucleotide
  modified_base 6: mod_base = OTHER; note 3-(((2R,3R,4R,5R)-2-(2,4-dioxo-3,4-dihydropyrimidin-1(2H)-y l)-4-hydroxy-5-(hydroxymethyl)tetrahydrofuran-3-yl)oxy)-N-h exadecylpropanamide nucleotide
  modified_base 7: mod_base = OTHER; note = 2'O-methyl-nucleotide
  modified_base 8: mod_base = OTHER; note = 2'O-methyl-nucleotide
  modified_base 9: mod_base = OTHER; note = 2'O-methyl-nucleotide
  modified_base 10: mod_base = OTHER; note = 2'fluoro-nucleotide
  modified_base 11: mod_base = OTHER; note = 2'fluoro-nucleotide
  modified_base 12: mod_base = OTHER; note = 2'fluoro-nucleotide
  modified_base 13: mod_base = OTHER; note = 2'O-methyl-nucleotide
  modified_base 14: mod_base = OTHER; note = 2'O-methyl-nucleotide
  modified_base 15: mod_base = OTHER; note = 2'O-methyl-nucleotide
  modified_base 16: mod_base = OTHER; note = 2'O-methyl-nucleotide
  modified_base 17: mod_base = OTHER; note = 2'O-methyl-nucleotide
  modified_base 18: mod_base = OTHER; note = 2'O-methyl-nucleotide
  modified_base 19: mod_base = OTHER; note = 2'O-methyl-nucleotide
  modified_base 20: mod_base = OTHER; note = 2'O-methyl-nucleotide
  modified_base 21: mod_base = OTHER; note = 2'O-methyl-nucleotide phosphorothioate
  modified_base 22: mod_base = OTHER; note = 2'O-methyl-nucleotide phosphorothioate
  modified_base 23: mod_base = OTHER; note = Inverted abasic nucleotide
natagtctacaaaccagttgaan

SEQ ID NO: 268 - RNA, 21 nt, synthetic construct
  source 1..21: mol_type = other RNA
  modified_base 1: mod_base = OTHER; note = Vinyl phosphonate 2'O-methyl-nucleotide phosphorothioate
  modified_base 2: mod_base = OTHER; note = 2'fluoro-nucleotide phosphorothioate
  modified_base 3: mod_base = OTHER; note = 2'O-methyl-nucleotide phosphorothioate
  modified_base 4: mod_base = OTHER; note = 2'O-methyl-nucleotide
  modified_base 5: mod_base = OTHER; note = 2'O-methyl-nucleotide
  modified_base 6: mod_base = OTHER; note = 2'fluoro-nucleotide
  modified_base 7: mod_base = OTHER; note = 2'O-methyl-nucleotide
  modified_base 8: mod_base = OTHER; note = 2'fluoro-nucleotide
  modified_base 9: mod_base = OTHER; note = 2'fluoro-nucleotide
  modified_base 10: mod_base = OTHER; note = 2'O-methyl-nucleotide
  modified_base 11: mod_base = OTHER; note = 2'O-methyl-nucleotide
  modified_base 12: mod_base = OTHER; note = 2'O-methyl-nucleotide
  modified_base 13: mod_base = OTHER; note = 2'O-methyl-nucleotide
  modified_base 14: mod_base = OTHER; note = 2'fluoro-nucleotide
  modified_base 15: mod_base = OTHER; note = 2'O-methyl-nucleotide
  modified_base 16: mod_base = OTHER; note = 2'fluoro-nucleotide
  modified_base 17: mod_base = OTHER; note = 2'O-methyl-nucleotide
  modified_base 18: mod_base = OTHER; note = 2'O-methyl-nucleotide
  modified_base 19: mod_base = OTHER; note = 2'O-methyl-nucleotide phosphorothioate
  modified_base 20: mod_base = OTHER; note = 2'O-methyl-nucleotide phosphorothioate
  modified_base 21: mod_base = OTHER; note = 2'O-methyl-nucleotide
ttcaactggtttgtagactat

SEQ ID NO: 269 - RNA, 23 nt, synthetic construct
  source 1..23: mol_type = other RNA
  modified_base 1: mod_base = OTHER; note = Inverted abasic nucleotide phosphorothioate
  modified_base 2: mod_base = OTHER; note = 2'O-methyl-nucleotide phosphorothioate
  modified_base 3: mod_base = OTHER; note = 2'O-methyl-nucleotide
  modified_base 4: mod_base = OTHER; note = 2'O-methyl-nucleotide
  modified_base 5: mod_base = OTHER; note = 2'O-methyl-nucleotide
  modified_base 6: mod_base = OTHER; note = 2'O-methyl-nucleotide
  modified_base 7: mod_base = OTHER; note = 2'O-methyl-nucleotide
  modified_base 8: mod_base = OTHER; note 3-(((2R,3R,4R,5R)-2-(2,4-dioxo-3,4-dihydropyrimidin-1(2H)-y l)-4-hydroxy-5-(hydroxymethyl)tetrahydrofuran-3-yl)oxy)-N-h exadecylpropanamide nucleotide
  modified_base 9: mod_base = OTHER; note = 2'O-methyl-nucleotide
  modified_base 10: mod_base = OTHER; note = 2'fluoro-nucleotide
  modified_base 11: mod_base = OTHER; note = 2'fluoro-nucleotide
  modified_base 12: mod_base = OTHER; note = 2'fluoro-nucleotide
  modified_base 13: mod_base = OTHER; note = 2'O-methyl-nucleotide
  modified_base 14: mod_base = OTHER; note = 2'O-methyl-nucleotide
  modified_base 15: mod_base = OTHER; note = 2'O-methyl-nucleotide
  modified_base 16: mod_base = OTHER; note = 2'O-methyl-nucleotide
  modified_base 17: mod_base = OTHER; note = 2'O-methyl-nucleotide
  modified_base 18: mod_base = OTHER; note = 2'O-methyl-nucleotide
  modified_base 19: mod_base = OTHER; note = 2'O-methyl-nucleotide
  modified_base 20: mod_base = OTHER; note = 2'O-methyl-nucleotide
  modified_base 21: mod_base = OTHER; note = 2'O-methyl-nucleotide phosphorothioate
  modified_base 22: mod_base = OTHER; note = 2'O-methyl-nucleotide phosphorothioate
  modified_base 23: mod_base = OTHER; note = Inverted abasic nucleotide
natagtctacaaaccagttgaan

SEQ ID NO: 270 - RNA, 21 nt, synthetic construct
  source 1..21: mol_type = other RNA
  modified_base 1: mod_base = OTHER; note = Vinyl phosphonate 2'O-methyl-nucleotide phosphorothioate
  modified_base 2: mod_base = OTHER; note = 2'fluoro-nucleotide phosphorothioate
  modified_base 3: mod_base = OTHER; note = 2'O-methyl-nucleotide phosphorothioate
  modified_base 4: mod_base = OTHER; note = 2'O-methyl-nucleotide
  modified_base 5: mod_base = OTHER; note = 2'O-methyl-nucleotide
  modified_base 6: mod_base = OTHER; note = 2'fluoro-nucleotide
  modified_base 7: mod_base = OTHER; note = 2'O-methyl-nucleotide
  modified_base 8: mod_base = OTHER; note = 2'fluoro-nucleotide
  modified_base 9: mod_base = OTHER; note = 2'fluoro-nucleotide
  modified_base 10: mod_base = OTHER; note = 2'O-methyl-nucleotide
  modified_base 11: mod_base = OTHER; note = 2'O-methyl-nucleotide
  modified_base 12: mod_base = OTHER; note = 2'O-methyl-nucleotide
  modified_base 13: mod_base = OTHER; note = 2'O-methyl-nucleotide
  modified_base 14: mod_base = OTHER; note = 2'fluoro-nucleotide
  modified_base 15: mod_base = OTHER; note = 2'O-methyl-nucleotide
  modified_base 16: mod_base = OTHER; note = 2'fluoro-nucleotide
  modified_base 17: mod_base = OTHER; note = 2'O-methyl-nucleotide
  modified_base 18: mod_base = OTHER; note = 2'O-methyl-nucleotide
  modified_base 19: mod_base = OTHER; note = 2'O-methyl-nucleotide phosphorothioate
  modified_base 20: mod_base = OTHER; note = 2'O-methyl-nucleotide phosphorothioate
  modified_base 21: mod_base = OTHER; note = 2'O-methyl-nucleotide
ttcaactggtttgtagactat

SEQ ID NO: 271 - RNA, 23 nt, synthetic construct
  source 1..23: mol_type = other RNA
  modified_base 1: mod_base = OTHER; note = Inverted abasic nucleotide phosphorothioate
  modified_base 2: mod_base = OTHER; note = 2'O-methyl-nucleotide phosphorothioate
  modified_base 3: mod_base = OTHER; note = 2'O-methyl-nucleotide
  modified_base 4: mod_base = OTHER; note = 2'O-methyl-nucleotide
  modified_base 5: mod_base = OTHER; note = 2'O-methyl-nucleotide
  modified_base 6: mod_base = OTHER; note = 2'O-methyl-nucleotide
  modified_base 7: mod_base = OTHER; note = 2'O-methyl-nucleotide
  modified_base 8: mod_base = OTHER; note = 2'O-methyl-nucleotide
  modified_base 9: mod_base = OTHER; note = 2'O-methyl-nucleotide
  modified_base 10: mod_base = OTHER; note = 2'fluoro-nucleotide
  modified_base 11: mod_base = OTHER; note = 2'fluoro-nucleotide
  modified_base 12: mod_base = OTHER; note = 2'fluoro-nucleotide
  modified_base 13: mod_base = OTHER; note = 2'O-methyl-nucleotide
  modified_base 14: mod_base = OTHER; note = 2'O-methyl-nucleotide
  modified_base 15: mod_base = OTHER; note = 2'O-methyl-nucleotide
  modified_base 16: mod_base = OTHER; note = 2'O-methyl-nucleotide
  modified_base 17: mod_base = OTHER; note = 2'O-methyl-nucleotide
  modified_base 18: mod_base = OTHER; note 3-(((2R,3R,4R,5R)-2-(2,4-dioxo-3,4-dihydropyrimidin-1(2H)-y l)-4-hydroxy-5-(hydroxymethyl)tetrahydrofuran-3-yl)oxy)-N-h exadecylpropanamide nucleotide
  modified_base 19: mod_base = OTHER; note = 2'O-methyl-nucleotide
  modified_base 20: mod_base = OTHER; note = 2'O-methyl-nucleotide
  modified_base 21: mod_base = OTHER; note = 2'O-methyl-nucleotide phosphorothioate
  modified_base 22: mod_base = OTHER; note = 2'O-methyl-nucleotide phosphorothioate
  modified_base 23: mod_base = OTHER; note = Inverted abasic nucleotide
natagtctacaaaccagttgaan

SEQ ID NO: 272 - RNA, 21 nt, synthetic construct
  source 1..21: mol_type = other RNA
  modified_base 1: mod_base = OTHER; note = Vinyl phosphonate 2'O-methyl-nucleotide phosphorothioate
  modified_base 2: mod_base = OTHER; note = 2'fluoro-nucleotide phosphorothioate
  modified_base 3: mod_base = OTHER; note = 2'O-methyl-nucleotide phosphorothioate
  modified_base 4: mod_base = OTHER; note = 2'O-methyl-nucleotide
  modified_base 5: mod_base = OTHER; note = 2'O-methyl-nucleotide
  modified_base 6: mod_base = OTHER; note = 2'fluoro-nucleotide
  modified_base 7: mod_base = OTHER; note = 2'O-methyl-nucleotide
  modified_base 8: mod_base = OTHER; note = 2'fluoro-nucleotide
  modified_base 9: mod_base = OTHER; note = 2'fluoro-nucleotide
  modified_base 10: mod_base = OTHER; note = 2'O-methyl-nucleotide
  modified_base 11: mod_base = OTHER; note = 2'O-methyl-nucleotide
  modified_base 12: mod_base = OTHER; note = 2'O-methyl-nucleotide
  modified_base 13: mod_base = OTHER; note = 2'O-methyl-nucleotide
  modified_base 14: mod_base = OTHER; note = 2'fluoro-nucleotide
  modified_base 15: mod_base = OTHER; note = 2'O-methyl-nucleotide
  modified_base 16: mod_base = OTHER; note = 2'fluoro-nucleotide
  modified_base 17: mod_base = OTHER; note = 2'O-methyl-nucleotide
  modified_base 18: mod_base = OTHER; note = 2'O-methyl-nucleotide
  modified_base 19: mod_base = OTHER; note = 2'O-methyl-nucleotide phosphorothioate
  modified_base 20: mod_base = OTHER; note = 2'O-methyl-nucleotide phosphorothioate
  modified_base 21: mod_base = OTHER; note = 2'O-methyl-nucleotide
ttcaactggtttgtagactat

SEQ ID NO: 273 - RNA, 23 nt, synthetic construct
  source 1..23: mol_type = other RNA
  modified_base 1: mod_base = OTHER; note = Inverted abasic nucleotide phosphorothioate
  modified_base 2: mod_base = OTHER; note = 2'O-methyl-nucleotide phosphorothioate
  modified_base 3: mod_base = OTHER; note = 2'O-methyl-nucleotide
  modified_base 4: mod_base = OTHER; note = 2'O-methyl-nucleotide
  modified_base 5: mod_base = OTHER; note = 2'O-methyl-nucleotide
  modified_base 6: mod_base = OTHER; note = 2'O-methyl-nucleotide
  modified_base 7: mod_base = OTHER; note = 2'O-methyl-nucleotide
  modified_base 8: mod_base = OTHER; note = 2'O-methyl-nucleotide
  modified_base 9: mod_base = OTHER; note = 2'O-methyl-nucleotide
  modified_base 10: mod_base = OTHER; note = 2'fluoro-nucleotide
  modified_base 11: mod_base = OTHER; note = 2'fluoro-nucleotide
  modified_base 12: mod_base = OTHER; note = 2'fluoro-nucleotide
  modified_base 13: mod_base = OTHER; note = 2'O-methyl-nucleotide
  modified_base 14: mod_base = OTHER; note = 2'O-methyl-nucleotide
  modified_base 15: mod_base = OTHER; note = 2'O-methyl-nucleotide
  modified_base 16: mod_base = OTHER; note = 2'O-methyl-nucleotide
  modified_base 17: mod_base = OTHER; note = 2'O-methyl-nucleotide
  modified_base 18: mod_base = OTHER; note = 2'O-methyl-nucleotide
  modified_base 19: mod_base = OTHER; note 3-(((2R,3R,4R,5R)-2-(2,4-dioxo-3,4-dihydropyrimidin-1(2H)-y l)-4-hydroxy-5-(hydroxymethyl)tetrahydrofuran-3-yl)oxy)-N-h exadecylpropanamide nucleotide
  modified_base 20: mod_base = OTHER; note = 2'O-methyl-nucleotide
  modified_base 21: mod_base = OTHER; note = 2'O-methyl-nucleotide phosphorothioate
  modified_base 22: mod_base = OTHER; note = 2'O-methyl-nucleotide phosphorothioate
  modified_base 23: mod_base = OTHER; note = Inverted abasic nucleotide
natagtctacaaaccagttgaan

SEQ ID NO: 274 - RNA, 21 nt, synthetic construct
  source 1..21: mol_type = other RNA
  modified_base 1: mod_base = OTHER; note = Vinyl phosphonate 2'O-methyl-nucleotide phosphorothioate
  modified_base 2: mod_base = OTHER; note = 2'fluoro-nucleotide phosphorothioate
  modified_base 3: mod_base = OTHER; note = 2'O-methyl-nucleotide phosphorothioate
  modified_base 4: mod_base = OTHER; note = 2'O-methyl-nucleotide
  modified_base 5: mod_base = OTHER; note = 2'O-methyl-nucleotide
  modified_base 6: mod_base = OTHER; note = 2'fluoro-nucleotide
  modified_base 7: mod_base = OTHER; note = 2'O-methyl-nucleotide
  modified_base 8: mod_base = OTHER; note = 2'fluoro-nucleotide
  modified_base 9: mod_base = OTHER; note = 2'fluoro-nucleotide
  modified_base 10: mod_base = OTHER; note = 2'O-methyl-nucleotide
  modified_base 11: mod_base = OTHER; note = 2'O-methyl-nucleotide
  modified_base 12: mod_base = OTHER; note = 2'O-methyl-nucleotide
  modified_base 13: mod_base = OTHER; note = 2'O-methyl-nucleotide
  modified_base 14: mod_base = OTHER; note = 2'fluoro-nucleotide
  modified_base 15: mod_base = OTHER; note = 2'O-methyl-nucleotide
  modified_base 16: mod_base = OTHER; note = 2'fluoro-nucleotide
  modified_base 17: mod_base = OTHER; note = 2'O-methyl-nucleotide
  modified_base 18: mod_base = OTHER; note = 2'O-methyl-nucleotide
  modified_base 19: mod_base = OTHER; note = 2'O-methyl-nucleotide phosphorothioate
  modified_base 20: mod_base = OTHER; note = 2'O-methyl-nucleotide phosphorothioate
  modified_base 21: mod_base = OTHER; note = 2'O-methyl-nucleotide
ttcaactggtttgtagactat

SEQ ID NO: 275 - RNA, 23 nt, synthetic construct
  source 1..23: mol_type = other RNA
  modified_base 1: mod_base = OTHER; note = Inverted abasic nucleotide phosphorothioate
  modified_base 2: mod_base = OTHER; note = 2'O-methyl-nucleotide phosphorothioate
  modified_base 3: mod_base = OTHER; note (2R,3R,4R,5R)-2-(2,4-dioxo-3,4-dihydropyrimidin-1(2H)-yl)-4 -hydroxy-5-(hydroxymethyl)tetrahydrofuran-3-yl hexadecylcarbamate nucleotide
  modified_base 4: mod_base = OTHER; note = 2'O-methyl-nucleotide
  modified_base 5: mod_base = OTHER; note = 2'O-methyl-nucleotide
  modified_base 6: mod_base = OTHER; note = 2'O-methyl-nucleotide
  modified_base 7: mod_base = OTHER; note = 2'O-methyl-nucleotide
  modified_base 8: mod_base = OTHER; note = 2'O-methyl-nucleotide
  modified_base 9: mod_base = OTHER; note = 2'O-methyl-nucleotide
  modified_base 10: mod_base = OTHER; note = 2'fluoro-nucleotide
  modified_base 11: mod_base = OTHER; note = 2'fluoro-nucleotide
  modified_base 12: mod_base = OTHER; note = 2'fluoro-nucleotide
  modified_base 13: mod_base = OTHER; note = 2'O-methyl-nucleotide
  modified_base 14: mod_base = OTHER; note = 2'O-methyl-nucleotide
  modified_base 15: mod_base = OTHER; note = 2'O-methyl-nucleotide
  modified_base 16: mod_base = OTHER; note = 2'O-methyl-nucleotide
  modified_base 17: mod_base = OTHER; note = 2'O-methyl-nucleotide
  modified_base 18: mod_base = OTHER; note = 2'O-methyl-nucleotide
  modified_base 19: mod_base = OTHER; note = 2'O-methyl-nucleotide
  modified_base 20: mod_base = OTHER; note = 2'O-methyl-nucleotide
  modified_base 21: mod_base = OTHER; note = 2'O-methyl-nucleotide phosphorothioate
  modified_base 22: mod_base = OTHER; note = 2'O-methyl-nucleotide phosphorothioate
  modified_base 23: mod_base = OTHER; note = Inverted abasic nucleotide
natagtctacaaaccagttgaan

SEQ ID NO: 276 - RNA, 21 nt, synthetic construct
  source 1..21: mol_type = other RNA
  modified_base 1: mod_base = OTHER; note = Vinyl phosphonate 2'O-methyl-nucleotide phosphorothioate
  modified_base 2: mod_base = OTHER; note = 2'fluoro-nucleotide phosphorothioate
  modified_base 3: mod_base = OTHER; note = 2'O-methyl-nucleotide phosphorothioate
  modified_base 4: mod_base = OTHER; note = 2'O-methyl-nucleotide
  modified_base 5: mod_base = OTHER; note = 2'O-methyl-nucleotide
  modified_base 6: mod_base = OTHER; note = 2'fluoro-nucleotide
  modified_base 7: mod_base = OTHER; note = 2'O-methyl-nucleotide
  modified_base 8: mod_base = OTHER; note = 2'fluoro-nucleotide
  modified_base 9: mod_base = OTHER; note = 2'fluoro-nucleotide
  modified_base 10: mod_base = OTHER; note = 2'O-methyl-nucleotide
  modified_base 11: mod_base = OTHER; note = 2'O-methyl-nucleotide
  modified_base 12: mod_base = OTHER; note = 2'O-methyl-nucleotide
  modified_base 13: mod_base = OTHER; note = 2'O-methyl-nucleotide
  modified_base 14: mod_base = OTHER; note = 2'fluoro-nucleotide
  modified_base 15: mod_base = OTHER; note = 2'O-methyl-nucleotide
  modified_base 16: mod_base = OTHER; note = 2'fluoro-nucleotide
  modified_base 17: mod_base = OTHER; note = 2'O-methyl-nucleotide
  modified_base 18: mod_base = OTHER; note = 2'O-methyl-nucleotide
  modified_base 19: mod_base = OTHER; note = 2'O-methyl-nucleotide phosphorothioate
  modified_base 20: mod_base = OTHER; note = 2'O-methyl-nucleotide phosphorothioate
  modified_base 21: mod_base = OTHER; note = 2'O-methyl-nucleotide
ttcaactggtttgtagactat

SEQ ID NO: 277 - RNA, 23 nt, synthetic construct
  source 1..23: mol_type = other RNA
  modified_base 1: mod_base = OTHER; note = Inverted abasic nucleotide phosphorothioate
  modified_base 2: mod_base = OTHER; note = 2'O-methyl-nucleotide phosphorothioate
  modified_base 3: mod_base = OTHER; note = 2'O-methyl-nucleotide
  modified_base 4: mod_base = OTHER; note = 2'O-methyl-nucleotide
  modified_base 5: mod_base = OTHER; note = 2'O-methyl-nucleotide
  modified_base 6: mod_base = OTHER; note (2R,3R,4R,5R)-2-(2,4-dioxo-3,4-dihydropyrimidin-1(2H)-yl)-4 -hydroxy-5-(hydroxymethyl)tetrahydrofuran-3-yl hexadecylcarbamate nucleotide
  modified_base 7: mod_base = OTHER; note = 2'O-methyl-nucleotide
  modified_base 8: mod_base = OTHER; note = 2'O-methyl-nucleotide
  modified_base 9: mod_base = OTHER; note = 2'O-methyl-nucleotide
  modified_base 10: mod_base = OTHER; note = 2'fluoro-nucleotide
  modified_base 11: mod_base = OTHER; note = 2'fluoro-nucleotide
  modified_base 12: mod_base = OTHER; note = 2'fluoro-nucleotide
  modified_base 13: mod_base = OTHER; note = 2'O-methyl-nucleotide
  modified_base 14: mod_base = OTHER; note = 2'O-methyl-nucleotide
  modified_base 15: mod_base = OTHER; note = 2'O-methyl-nucleotide
  modified_base 16: mod_base = OTHER; note = 2'O-methyl-nucleotide
  modified_base 17: mod_base = OTHER; note = 2'O-methyl-nucleotide
  modified_base 18: mod_base = OTHER; note = 2'O-methyl-nucleotide
  modified_base 19: mod_base = OTHER; note = 2'O-methyl-nucleotide
  modified_base 20: mod_base = OTHER; note = 2'O-methyl-nucleotide
  modified_base 21: mod_base = OTHER; note = 2'O-methyl-nucleotide phosphorothioate
  modified_base 22: mod_base = OTHER; note = 2'O-methyl-nucleotide phosphorothioate
  modified_base 23: mod_base = OTHER; note = Inverted abasic nucleotide
natagtctacaaaccagttgaan

SEQ ID NO: 278 - RNA, 21 nt, synthetic construct
  source 1..21: mol_type = other RNA
  modified_base 1: mod_base = OTHER; note = Vinyl phosphonate 2'O-methyl-nucleotide phosphorothioate
  modified_base 2: mod_base = OTHER; note = 2'fluoro-nucleotide phosphorothioate
  modified_base 3: mod_base = OTHER; note = 2'O-methyl-nucleotide phosphorothioate
  modified_base 4: mod_base = OTHER; note = 2'O-methyl-nucleotide
  modified_base 5: mod_base = OTHER; note = 2'O-methyl-nucleotide
  modified_base 6: mod_base = OTHER; note = 2'fluoro-nucleotide
  modified_base 7: mod_base = OTHER; note = 2'O-methyl-nucleotide
  modified_base 8: mod_base = OTHER; note = 2'fluoro-nucleotide
  modified_base 9: mod_base = OTHER; note = 2'fluoro-nucleotide
  modified_base 10: mod_base = OTHER; note = 2'O-methyl-nucleotide
  modified_base 11: mod_base = OTHER; note = 2'O-methyl-nucleotide
  modified_base 12: mod_base = OTHER; note = 2'O-methyl-nucleotide
  modified_base 13: mod_base = OTHER; note = 2'O-methyl-nucleotide
  modified_base 14: mod_base = OTHER; note = 2'fluoro-nucleotide
  modified_base 15: mod_base = OTHER; note = 2'O-methyl-nucleotide
  modified_base 16: mod_base = OTHER; note = 2'fluoro-nucleotide
  modified_base 17: mod_base = OTHER; note = 2'O-methyl-nucleotide
  modified_base 18: mod_base = OTHER; note = 2'O-methyl-nucleotide
  modified_base 19: mod_base = OTHER; note = 2'O-methyl-nucleotide phosphorothioate
  modified_base 20: mod_base = OTHER; note = 2'O-methyl-nucleotide phosphorothioate
  modified_base 21: mod_base = OTHER; note = 2'O-methyl-nucleotide
ttcaactggtttgtagactat

SEQ ID NO: 279 - RNA, 23 nt, synthetic construct
  source 1..23: mol_type = other RNA
  modified_base 1: mod_base = OTHER; note = Inverted abasic nucleotide phosphorothioate
  modified_base 2: mod_base = OTHER; note = 2'O-methyl-nucleotide phosphorothioate
  modified_base 3: mod_base = OTHER; note = 2'O-methyl-nucleotide
  modified_base 4: mod_base = OTHER; note = 2'O-methyl-nucleotide
  modified_base 5: mod_base = OTHER; note = 2'O-methyl-nucleotide
  modified_base 6: mod_base = OTHER; note = 2'O-methyl-nucleotide
  modified_base 7: mod_base = OTHER; note = 2'O-methyl-nucleotide
  modified_base 8: mod_base = OTHER; note (2R,3R,4R,5R)-2-(2,4-dioxo-3,4-dihydropyrimidin-1(2H)-yl)-4 -hydroxy-5-(hydroxymethyl)tetrahydrofuran-3-yl hexadecylcarbamate nucleotide
  modified_base 9: mod_base = OTHER; note = 2'O-methyl-nucleotide
  modified_base 10: mod_base = OTHER; note = 2'fluoro-nucleotide
  modified_base 11: mod_base = OTHER; note = 2'fluoro-nucleotide
  modified_base 12: mod_base = OTHER; note = 2'fluoro-nucleotide
  modified_base 13: mod_base = OTHER; note = 2'O-methyl-nucleotide
  modified_base 14: mod_base = OTHER; note = 2'O-methyl-nucleotide
  modified_base 15: mod_base = OTHER; note = 2'O-methyl-nucleotide
  modified_base 16: mod_base = OTHER; note = 2'O-methyl-nucleotide
  modified_base 17: mod_base = OTHER; note = 2'O-methyl-nucleotide
  modified_base 18: mod_base = OTHER; note = 2'O-methyl-nucleotide
  modified_base 19: mod_base = OTHER; note = 2'O-methyl-nucleotide
  modified_base 20: mod_base = OTHER; note = 2'O-methyl-nucleotide
  modified_base 21: mod_base = OTHER; note = 2'O-methyl-nucleotide phosphorothioate
  modified_base 22: mod_base = OTHER; note = 2'O-methyl-nucleotide phosphorothioate
  modified_base 23: mod_base = OTHER; note = Inverted abasic nucleotide
natagtctacaaaccagttgaan

SEQ ID NO: 280 - RNA, 21 nt, synthetic construct
  source 1..21: mol_type = other RNA
  modified_base 1: mod_base = OTHER; note = Vinyl phosphonate 2'O-methyl-nucleotide phosphorothioate
  modified_base 2: mod_base = OTHER; note = 2'fluoro-nucleotide phosphorothioate
  modified_base 3: mod_base = OTHER; note = 2'O-methyl-nucleotide phosphorothioate
  modified_base 4: mod_base = OTHER; note = 2'O-methyl-nucleotide
  modified_base 5: mod_base = OTHER; note = 2'O-methyl-nucleotide
  modified_base 6: mod_base = OTHER; note = 2'fluoro-nucleotide
  modified_base 7: mod_base = OTHER; note = 2'O-methyl-nucleotide
  modified_base 8: mod_base = OTHER; note = 2'fluoro-nucleotide
  modified_base 9: mod_base = OTHER; note = 2'fluoro-nucleotide
  modified_base 10: mod_base = OTHER; note = 2'O-methyl-nucleotide
  modified_base 11: mod_base = OTHER; note = 2'O-methyl-nucleotide
  modified_base 12: mod_base = OTHER; note = 2'O-methyl-nucleotide
  modified_base 13: mod_base = OTHER; note = 2'O-methyl-nucleotide
  modified_base 14: mod_base = OTHER; note = 2'fluoro-nucleotide
  modified_base 15: mod_base = OTHER; note = 2'O-methyl-nucleotide
  modified_base 16: mod_base = OTHER; note = 2'fluoro-nucleotide
  modified_base 17: mod_base = OTHER; note = 2'O-methyl-nucleotide
  modified_base 18: mod_base = OTHER; note = 2'O-methyl-nucleotide
  modified_base 19: mod_base = OTHER; note = 2'O-methyl-nucleotide phosphorothioate
  modified_base 20: mod_base = OTHER; note = 2'O-methyl-nucleotide phosphorothioate
  modified_base 21: mod_base = OTHER; note = 2'O-methyl-nucleotide
ttcaactggtttgtagactat

SEQ ID NO: 281 - RNA, 23 nt, synthetic construct
  source 1..23: mol_type = other RNA
  modified_base 1: mod_base = OTHER; note = Inverted abasic nucleotide phosphorothioate
  modified_base 2: mod_base = OTHER; note = 2'O-methyl-nucleotide phosphorothioate
  modified_base 3: mod_base = OTHER; note = 2'O-methyl-nucleotide
  modified_base 4: mod_base = OTHER; note = 2'O-methyl-nucleotide
  modified_base 5: mod_base = OTHER; note = 2'O-methyl-nucleotide
  modified_base 6: mod_base = OTHER; note = 2'O-methyl-nucleotide
  modified_base 7: mod_base = OTHER; note = 2'O-methyl-nucleotide
  modified_base 8: mod_base = OTHER; note = 2'O-methyl-nucleotide
  modified_base 9: mod_base = OTHER; note = 2'O-methyl-nucleotide
  modified_base 10: mod_base = OTHER; note = 2'fluoro-nucleotide
  modified_base 11: mod_base = OTHER; note = 2'fluoro-nucleotide
  modified_base 12: mod_base = OTHER; note = 2'fluoro-nucleotide
  modified_base 13: mod_base = OTHER; note = 2'O-methyl-nucleotide
  modified_base 14: mod_base = OTHER; note = 2'O-methyl-nucleotide
  modified_base 15: mod_base = OTHER; note = 2'O-methyl-nucleotide
  modified_base 16: mod_base = OTHER; note = 2'O-methyl-nucleotide
  modified_base 17: mod_base = OTHER; note = 2'O-methyl-nucleotide
  modified_base 18: mod_base = OTHER; note (2R,3R,4R,5R)-2-(2,4-dioxo-3,4-dihydropyrimidin-1(2H)-yl)-4 -hydroxy-5-(hydroxymethyl)tetrahydrofuran-3-yl hexadecylcarbamate nucleotide
  modified_base 19: mod_base = OTHER; note = 2'O-methyl-nucleotide
  modified_base 20: mod_base = OTHER; note = 2'O-methyl-nucleotide
  modified_base 21: mod_base = OTHER; note = 2'O-methyl-nucleotide phosphorothioate
  modified_base 22: mod_base = OTHER; note = 2'O-methyl-nucleotide phosphorothioate
  modified_base 23: mod_base = OTHER; note = Inverted abasic nucleotide
natagtctacaaaccagttgaan

SEQ ID NO: 282 - RNA, 21 nt, synthetic construct
  source 1..21: mol_type = other RNA
  modified_base 1: mod_base = OTHER; note = Vinyl phosphonate 2'O-methyl-nucleotide phosphorothioate
  modified_base 2: mod_base = OTHER; note = 2'fluoro-nucleotide phosphorothioate
  modified_base 3: mod_base = OTHER; note = 2'O-methyl-nucleotide phosphorothioate
  modified_base 4: mod_base = OTHER; note = 2'O-methyl-nucleotide
  modified_base 5: mod_base = OTHER; note = 2'O-methyl-nucleotide
  modified_base 6: mod_base = OTHER; note = 2'fluoro-nucleotide
  modified_base 7: mod_base = OTHER; note = 2'O-methyl-nucleotide
  modified_base 8: mod_base = OTHER; note = 2'fluoro-nucleotide
  modified_base 9: mod_base = OTHER; note = 2'fluoro-nucleotide
  modified_base 10: mod_base = OTHER; note = 2'O-methyl-nucleotide
  modified_base 11: mod_base = OTHER; note = 2'O-methyl-nucleotide
  modified_base 12: mod_base = OTHER; note = 2'O-methyl-nucleotide
  modified_base 13: mod_base = OTHER; note = 2'O-methyl-nucleotide
  modified_base 14: mod_base = OTHER; note = 2'fluoro-nucleotide
  modified_base 15: mod_base = OTHER; note = 2'O-methyl-nucleotide
  modified_base 16: mod_base = OTHER; note = 2'fluoro-nucleotide
  modified_base 17: mod_base = OTHER; note = 2'O-methyl-nucleotide
  modified_base 18: mod_base = OTHER; note = 2'O-methyl-nucleotide
  modified_base 19: mod_base = OTHER; note = 2'O-methyl-nucleotide phosphorothioate
  modified_base 20: mod_base = OTHER; note = 2'O-methyl-nucleotide phosphorothioate
  modified_base 21: mod_base = OTHER; note = 2'O-methyl-nucleotide
ttcaactggtttgtagactat

SEQ ID NO: 283 - RNA, 23 nt, synthetic construct
  source 1..23: mol_type = other RNA
  modified_base 1: mod_base = OTHER; note = Inverted abasic nucleotide phosphorothioate
  modified_base 2: mod_base = OTHER; note = 2'O-methyl-nucleotide phosphorothioate
  modified_base 3: mod_base = OTHER; note = 2'O-methyl-nucleotide
  modified_base 4: mod_base = OTHER; note = 2'O-methyl-nucleotide
  modified_base 5: mod_base = OTHER; note = 2'O-methyl-nucleotide
  modified_base 6: mod_base = OTHER; note = 2'O-methyl-nucleotide
  modified_base 7: mod_base = OTHER; note = 2'O-methyl-nucleotide
  modified_base 8: mod_base = OTHER; note = 2'O-methyl-nucleotide
  modified_base 9: mod_base = OTHER; note = 2'O-methyl-nucleotide
  modified_base 10: mod_base = OTHER; note = 2'fluoro-nucleotide
  modified_base 11: mod_base = OTHER; note = 2'fluoro-nucleotide
  modified_base 12: mod_base = OTHER; note = 2'fluoro-nucleotide
  modified_base 13: mod_base = OTHER; note = 2'O-methyl-nucleotide
  modified_base 14: mod_base = OTHER; note = 2'O-methyl-nucleotide
  modified_base 15: mod_base = OTHER; note = 2'O-methyl-nucleotide
  modified_base 16: mod_base = OTHER; note = 2'O-methyl-nucleotide
  modified_base 17: mod_base = OTHER; note = 2'O-methyl-nucleotide
  modified_base 18: mod_base = OTHER; note = 2'O-methyl-nucleotide
  modified_base 19: mod_base = OTHER; note (2R,3R,4R,5R)-2-(2,4-dioxo-3,4-dihydropyrimidin-1(2H)-yl)-4 -hydroxy-5-(hydroxymethyl)tetrahydrofuran-3-yl hexadecylcarbamate nucleotide
  modified_base 20: mod_base = OTHER; note = 2'O-methyl-nucleotide
  modified_base 21: mod_base = OTHER; note = 2'O-methyl-nucleotide phosphorothioate
  modified_base 22: mod_base = OTHER; note = 2'O-methyl-nucleotide phosphorothioate
  modified_base 23: mod_base = OTHER; note = Inverted abasic nucleotide
natagtctacaaaccagttgaan

SEQ ID NO: 284 - RNA, 21 nt, synthetic construct
  source 1..21: mol_type = other RNA
  modified_base 1: mod_base = OTHER; note = Vinyl phosphonate 2'O-methyl-nucleotide phosphorothioate
  modified_base 2: mod_base = OTHER; note = 2'fluoro-nucleotide phosphorothioate
  modified_base 3: mod_base = OTHER; note = 2'O-methyl-nucleotide phosphorothioate
  modified_base 4: mod_base = OTHER; note = 2'O-methyl-nucleotide
  modified_base 5: mod_base = OTHER; note = 2'O-methyl-nucleotide
  modified_base 6: mod_base = OTHER; note = 2'fluoro-nucleotide
  modified_base 7: mod_base = OTHER; note = 2'O-methyl-nucleotide
  modified_base 8: mod_base = OTHER; note = 2'fluoro-nucleotide
  modified_base 9: mod_base = OTHER; note = 2'fluoro-nucleotide
  modified_base 10: mod_base = OTHER; note = 2'O-methyl-nucleotide
  modified_base 11: mod_base = OTHER; note = 2'O-methyl-nucleotide
  modified_base 12: mod_base = OTHER; note = 2'O-methyl-nucleotide
  modified_base 13: mod_base = OTHER; note = 2'O-methyl-nucleotide
  modified_base 14: mod_base = OTHER; note = 2'fluoro-nucleotide
  modified_base 15: mod_base = OTHER; note = 2'O-methyl-nucleotide
  modified_base 16: mod_base = OTHER; note = 2'fluoro-nucleotide
  modified_base 17: mod_base = OTHER; note = 2'O-methyl-nucleotide
  modified_base 18: mod_base = OTHER; note = 2'O-methyl-nucleotide
  modified_base 19: mod_base = OTHER; note = 2'O-methyl-nucleotide phosphorothioate
  modified_base 20: mod_base = OTHER; note = 2'O-methyl-nucleotide phosphorothioate
  modified_base 21: mod_base = OTHER; note = 2'O-methyl-nucleotide
ttcaactggtttgtagactat

SEQ ID NO: 285 - RNA, 23 nt, synthetic construct
  source 1..23: mol_type = other RNA
  modified_base 1: mod_base = OTHER; note = Inverted abasic nucleotide phosphorothioate
  modified_base 2: mod_base = OTHER; note = 2'O-methyl-nucleotide phosphorothioate
  modified_base 3: mod_base = OTHER; note 1-((2R,3R,4R,5R)-3-((15-((3r,5r,7r)-adamantan-1-yl)pentadec yl)oxy)-4-hydroxy-5-(hydroxymethyl)tetrahydrofuran-2-yl)pyr imidine-2,4(1H,3H)-dione nucleotide
  modified_base 4: mod_base = OTHER; note = 2'O-methyl-nucleotide
  modified_base 5: mod_base = OTHER; note = 2'O-methyl-nucleotide
  modified_base 6: mod_base = OTHER; note = 2'O-methyl-nucleotide
  modified_base 7: mod_base = OTHER; note = 2'O-methyl-nucleotide
  modified_base 8: mod_base = OTHER; note = 2'O-methyl-nucleotide
  modified_base 9: mod_base = OTHER; note = 2'O-methyl-nucleotide
  modified_base 10: mod_base = OTHER; note = 2'fluoro-nucleotide
  modified_base 11: mod_base = OTHER; note = 2'fluoro-nucleotide
  modified_base 12: mod_base = OTHER; note = 2'fluoro-nucleotide
  modified_base 13: mod_base = OTHER; note = 2'O-methyl-nucleotide
  modified_base 14: mod_base = OTHER; note = 2'O-methyl-nucleotide
  modified_base 15: mod_base = OTHER; note = 2'O-methyl-nucleotide
  modified_base 16: mod_base = OTHER; note = 2'O-methyl-nucleotide
  modified_base 17: mod_base = OTHER; note = 2'O-methyl-nucleotide
  modified_base 18: mod_base = OTHER; note = 2'O-methyl-nucleotide
  modified_base 19: mod_base = OTHER; note = 2'O-methyl-nucleotide
  modified_base 20: mod_base = OTHER; note = 2'O-methyl-nucleotide
  modified_base 21: mod_base = OTHER; note = 2'O-methyl-nucleotide phosphorothioate
  modified_base 22: mod_base = OTHER; note = 2'O-methyl-nucleotide phosphorothioate
  modified_base 23: mod_base = OTHER; note = Inverted abasic nucleotide
natagtctacaaaccagttgaan

SEQ ID NO: 286 - RNA, 21 nt, synthetic construct
  source 1..21: mol_type = other RNA
  modified_base 1: mod_base = OTHER; note = Vinyl phosphonate 2'O-methyl-nucleotide phosphorothioate
  modified_base 2: mod_base = OTHER; note = 2'fluoro-nucleotide phosphorothioate
  modified_base 3: mod_base = OTHER; note = 2'O-methyl-nucleotide phosphorothioate
  modified_base 4: mod_base = OTHER; note = 2'O-methyl-nucleotide
  modified_base 5: mod_base = OTHER; note = 2'O-methyl-nucleotide
  modified_base 6: mod_base = OTHER; note = 2'fluoro-nucleotide
  modified_base 7: mod_base = OTHER; note = 2'O-methyl-nucleotide
  modified_base 8: mod_base = OTHER; note = 2'fluoro-nucleotide
  modified_base 9: mod_base = OTHER; note = 2'fluoro-nucleotide
  modified_base 10: mod_base = OTHER; note = 2'O-methyl-nucleotide
  modified_base 11: mod_base = OTHER; note = 2'O-methyl-nucleotide
  modified_base 12: mod_base = OTHER; note = 2'O-methyl-nucleotide
  modified_base 13: mod_base = OTHER; note = 2'O-methyl-nucleotide
  modified_base 14: mod_base = OTHER; note = 2'fluoro-nucleotide
  modified_base 15: mod_base = OTHER; note = 2'O-methyl-nucleotide
  modified_base 16: mod_base = OTHER; note = 2'fluoro-nucleotide
  modified_base 17: mod_base = OTHER; note = 2'O-methyl-nucleotide
  modified_base 18: mod_base = OTHER; note = 2'O-methyl-nucleotide
  modified_base 19: mod_base = OTHER; note = 2'O-methyl-nucleotide phosphorothioate
  modified_base 20: mod_base = OTHER; note = 2'O-methyl-nucleotide phosphorothioate
  modified_base 21: mod_base = OTHER; note = 2'O-methyl-nucleotide
ttcaactggtttgtagactat

SEQ ID NO: 287 - RNA, 23 nt, synthetic construct
  source 1..23: mol_type = other RNA
  modified_base 1: mod_base = OTHER; note = Inverted abasic nucleotide phosphorothioate
  modified_base 2: mod_base = OTHER; note = 2'O-methyl-nucleotide phosphorothioate
  modified_base 3: mod_base = OTHER; note = 2'O-methyl-nucleotide
  modified_base 4: mod_base = OTHER; note = 2'O-methyl-nucleotide
  modified_base 5: mod_base = OTHER; note = 2'O-methyl-nucleotide
  modified_base 6: mod_base = OTHER; note 1-((2R,3R,4R,5R)-3-((15-((3r,5r,7r)-adamantan-1-yl)pentadec yl)oxy)-4-hydroxy-5-(hydroxymethyl)tetrahydrofuran-2-yl)pyr imidine-2,4(1H,3H)-dione nucleotide
  modified_base 7: mod_base = OTHER; note = 2'O-methyl-nucleotide
  modified_base 8: mod_base = OTHER; note = 2'O-methyl-nucleotide
  modified_base 9: mod_base = OTHER; note = 2'O-methyl-nucleotide
  modified_base 10: mod_base = OTHER; note = 2'fluoro-nucleotide
  modified_base 11: mod_base = OTHER; note = 2'fluoro-nucleotide
  modified_base 12: mod_base = OTHER; note = 2'fluoro-nucleotide
  modified_base 13: mod_base = OTHER; note = 2'O-methyl-nucleotide
  modified_base 14: mod_base = OTHER; note = 2'O-methyl-nucleotide
  modified_base 15: mod_base = OTHER; note = 2'O-methyl-nucleotide
  modified_base 16: mod_base = OTHER; note = 2'O-methyl-nucleotide
  modified_base 17: mod_base = OTHER; note = 2'O-methyl-nucleotide
  modified_base 18: mod_base = OTHER; note = 2'O-methyl-nucleotide
  modified_base 19: mod_base = OTHER; note = 2'O-methyl-nucleotide
  modified_base 20: mod_base = OTHER; note = 2'O-methyl-nucleotide
  modified_base 21: mod_base = OTHER; note = 2'O-methyl-nucleotide phosphorothioate
  modified_base 22: mod_base = OTHER; note = 2'O-methyl-nucleotide phosphorothioate
  modified_base 23: mod_base = OTHER; note = Inverted abasic nucleotide
natagtctacaaaccagttgaan

SEQ ID NO: 288 - RNA, 21 nt, synthetic construct
  source 1..21: mol_type = other RNA
  modified_base 1: mod_base = OTHER; note = Vinyl phosphonate 2'O-methyl-nucleotide phosphorothioate
  modified_base 2: mod_base = OTHER; note = 2'fluoro-nucleotide phosphorothioate
  modified_base 3: mod_base = OTHER; note = 2'O-methyl-nucleotide phosphorothioate
  modified_base 4: mod_base = OTHER; note = 2'O-methyl-nucleotide
  modified_base 5: mod_base = OTHER; note = 2'O-methyl-nucleotide
  modified_base 6: mod_base = OTHER; note = 2'fluoro-nucleotide
  modified_base 7: mod_base = OTHER; note = 2'O-methyl-nucleotide
  modified_base 8: mod_base = OTHER; note = 2'fluoro-nucleotide
  modified_base 9: mod_base = OTHER; note = 2'fluoro-nucleotide
  modified_base 10: mod_base = OTHER; note = 2'O-methyl-nucleotide
  modified_base 11: mod_base = OTHER; note = 2'O-methyl-nucleotide
  modified_base 12: mod_base = OTHER; note = 2'O-methyl-nucleotide
  modified_base 13: mod_base = OTHER; note = 2'O-methyl-nucleotide
  modified_base 14: mod_base = OTHER; note = 2'fluoro-nucleotide
  modified_base 15: mod_base = OTHER; note = 2'O-methyl-nucleotide
  modified_base 16: mod_base = OTHER; note = 2'fluoro-nucleotide
  modified_base 17: mod_base = OTHER; note = 2'O-methyl-nucleotide
  modified_base 18: mod_base = OTHER; note = 2'O-methyl-nucleotide
  modified_base 19: mod_base = OTHER; note = 2'O-methyl-nucleotide phosphorothioate
  modified_base 20: mod_base = OTHER; note = 2'O-methyl-nucleotide phosphorothioate
  modified_base 21: mod_base = OTHER; note = 2'O-methyl-nucleotide
ttcaactggtttgtagactat

SEQ ID NO: 289 - RNA, 23 nt, synthetic construct
  source 1..23: mol_type = other RNA
  modified_base 1: mod_base = OTHER; note = Inverted abasic nucleotide phosphorothioate
  modified_base 2: mod_base = OTHER; note = 2'O-methyl-nucleotide phosphorothioate
  modified_base 3: mod_base = OTHER; note = 2'O-methyl-nucleotide
  modified_base 4: mod_base = OTHER; note = 2'O-methyl-nucleotide
  modified_base 5: mod_base = OTHER; note = 2'O-methyl-nucleotide
  modified_base 6: mod_base = OTHER; note = 2'O-methyl-nucleotide
  modified_base 7: mod_base = OTHER; note = 2'O-methyl-nucleotide
  modified_base 8: mod_base = OTHER; note 1-((2R,3R,4R,5R)-3-((15-((3r,5r,7r)-adamantan-1-yl)pentadec yl)oxy)-4-hydroxy-5-(hydroxymethyl)tetrahydrofuran-2-yl)pyr imidine-2,4(1H,3H)-dione nucleotide
  modified_base 9: mod_base = OTHER; note = 2'O-methyl-nucleotide
  modified_base 10: mod_base = OTHER; note = 2'fluoro-nucleotide
  modified_base 11: mod_base = OTHER; note = 2'fluoro-nucleotide
  modified_base 12: mod_base = OTHER; note = 2'fluoro-nucleotide
  modified_base 13: mod_base = OTHER; note = 2'O-methyl-nucleotide
  modified_base 14: mod_base = OTHER; note = 2'O-methyl-nucleotide
  modified_base 15: mod_base = OTHER; note = 2'O-methyl-nucleotide
  modified_base 16: mod_base = OTHER; note = 2'O-methyl-nucleotide
  modified_base 17: mod_base = OTHER; note = 2'O-methyl-nucleotide
  modified_base 18: mod_base = OTHER; note = 2'O-methyl-nucleotide
  modified_base 19: mod_base = OTHER; note = 2'O-methyl-nucleotide
  modified_base 20: mod_base = OTHER; note = 2'O-methyl-nucleotide
  modified_base 21: mod_base = OTHER; note = 2'O-methyl-nucleotide phosphorothioate
  modified_base 22: mod_base = OTHER; note = 2'O-methyl-nucleotide phosphorothioate
  modified_base 23: mod_base = OTHER; note = Inverted abasic nucleotide
natagtctacaaaccagttgaan

SEQ ID NO: 290 - RNA, 21 nt, synthetic construct
  source 1..21: mol_type = other RNA
  modified_base 1: mod_base = OTHER; note = Vinyl phosphonate 2'O-methyl-nucleotide phosphorothioate
  modified_base 2: mod_base = OTHER; note = 2'fluoro-nucleotide phosphorothioate
  modified_base 3: mod_base = OTHER; note = 2'O-methyl-nucleotide phosphorothioate
  modified_base 4: mod_base = OTHER; note = 2'O-methyl-nucleotide
  modified_base 5: mod_base = OTHER; note = 2'O-methyl-nucleotide
  modified_base 6: mod_base = OTHER; note = 2'fluoro-nucleotide
  modified_base 7: mod_base = OTHER; note = 2'O-methyl-nucleotide
  modified_base 8: mod_base = OTHER; note = 2'fluoro-nucleotide
  modified_base 9: mod_base = OTHER; note = 2'fluoro-nucleotide
  modified_base 10: mod_base = OTHER; note = 2'O-methyl-nucleotide
  modified_base 11: mod_base = OTHER; note = 2'O-methyl-nucleotide
  modified_base 12: mod_base = OTHER; note = 2'O-methyl-nucleotide
  modified_base 13: mod_base = OTHER; note = 2'O-methyl-nucleotide
  modified_base 14: mod_base = OTHER; note = 2'fluoro-nucleotide
  modified_base 15: mod_base = OTHER; note = 2'O-methyl-nucleotide
  modified_base 16: mod_base = OTHER; note = 2'fluoro-nucleotide
  modified_base 17: mod_base = OTHER; note = 2'O-methyl-nucleotide
  modified_base 18: mod_base = OTHER; note = 2'O-methyl-nucleotide
  modified_base 19: mod_base = OTHER; note = 2'O-methyl-nucleotide phosphorothioate
  modified_base 20: mod_base = OTHER; note = 2'O-methyl-nucleotide phosphorothioate
  modified_base 21: mod_base = OTHER; note = 2'O-methyl-nucleotide
ttcaactggtttgtagactat

SEQ ID NO: 291 - RNA, 23 nt, synthetic construct
  source 1..23: mol_type = other RNA
  modified_base 1: mod_base = OTHER; note = Inverted abasic nucleotide phosphorothioate
  modified_base 2: mod_base = OTHER; note = 2'O-methyl-nucleotide phosphorothioate
  modified_base 3: mod_base = OTHER; note = 2'O-methyl-nucleotide
  modified_base 4: mod_base = OTHER; note = 2'O-methyl-nucleotide
  modified_base 5: mod_base = OTHER; note = 2'O-methyl-nucleotide
  modified_base 6: mod_base = OTHER; note = 2'O-methyl-nucleotide
  modified_base 7: mod_base = OTHER; note = 2'O-methyl-nucleotide
  modified_base 8: mod_base = OTHER; note = 2'O-methyl-nucleotide
  modified_base 9: mod_base = OTHER; note = 2'O-methyl-nucleotide
  modified_base 10: mod_base = OTHER; note = 2'fluoro-nucleotide
  modified_base 11: mod_base = OTHER; note = 2'fluoro-nucleotide
  modified_base 12: mod_base = OTHER; note = 2'fluoro-nucleotide
  modified_base 13: mod_base = OTHER; note = 2'O-methyl-nucleotide
  modified_base 14: mod_base = OTHER; note = 2'O-methyl-nucleotide
  modified_base 15: mod_base = OTHER; note = 2'O-methyl-nucleotide
  modified_base 16: mod_base = OTHER; note = 2'O-methyl-nucleotide
  modified_base 17: mod_base = OTHER; note = 2'O-methyl-nucleotide
  modified_base 18: mod_base = OTHER; note 1-((2R,3R,4R,5R)-3-((15-((3r,5r,7r)-adamantan-1-yl)pentadec yl)oxy)-4-hydroxy-5-(hydroxymethyl)tetrahydrofuran-2-yl)pyr imidine-2,4(1H,3H)-dione nucleotide
  modified_base 19: mod_base = OTHER; note = 2'O-methyl-nucleotide
  modified_base 20: mod_base = OTHER; note = 2'O-methyl-nucleotide
  modified_base 21: mod_base = OTHER; note = 2'O-methyl-nucleotide phosphorothioate
  modified_base 22: mod_base = OTHER; note = 2'O-methyl-nucleotide phosphorothioate
  modified_base 23: mod_base = OTHER; note = Inverted abasic nucleotide
natagtctacaaaccagttgaan

SEQ ID NO: 292 - RNA, 21 nt, synthetic construct
  source 1..21: mol_type = other RNA
  modified_base 1: mod_base = OTHER; note = Vinyl phosphonate 2'O-methyl-nucleotide phosphorothioate
  modified_base 2: mod_base = OTHER; note = 2'fluoro-nucleotide phosphorothioate
  modified_base 3: mod_base = OTHER; note = 2'O-methyl-nucleotide phosphorothioate
  modified_base 4: mod_base = OTHER; note = 2'O-methyl-nucleotide
  modified_base 5: mod_base = OTHER; note = 2'O-methyl-nucleotide
  modified_base 6: mod_base = OTHER; note = 2'fluoro-nucleotide
  modified_base 7: mod_base = OTHER; note = 2'O-methyl-nucleotide
  modified_base 8: mod_base = OTHER; note = 2'fluoro-nucleotide
  modified_base 9: mod_base = OTHER; note = 2'fluoro-nucleotide
  modified_base 10: mod_base = OTHER; note = 2'O-methyl-nucleotide
  modified_base 11: mod_base = OTHER; note = 2'O-methyl-nucleotide
  modified_base 12: mod_base = OTHER; note = 2'O-methyl-nucleotide
  modified_base 13: mod_base = OTHER; note = 2'O-methyl-nucleotide
  modified_base 14: mod_base = OTHER; note = 2'fluoro-nucleotide
  modified_base 15: mod_base = OTHER; note = 2'O-methyl-nucleotide
  modified_base 16: mod_base = OTHER; note = 2'fluoro-nucleotide
  modified_base 17: mod_base = OTHER; note = 2'O-methyl-nucleotide
  modified_base 18: mod_base = OTHER; note = 2'O-methyl-nucleotide
  modified_base 19: mod_base = OTHER; note = 2'O-methyl-nucleotide phosphorothioate
  modified_base 20: mod_base = OTHER; note = 2'O-methyl-nucleotide phosphorothioate
  modified_base 21: mod_base = OTHER; note = 2'O-methyl-nucleotide
ttcaactggtttgtagactat

SEQ ID NO: 293 - RNA, 23 nt, synthetic construct
  source 1..23: mol_type = other RNA
  modified_base 1: mod_base = OTHER; note = Inverted abasic nucleotide phosphorothioate
  modified_base 2: mod_base = OTHER; note = 2'O-methyl-nucleotide phosphorothioate
  modified_base 3: mod_base = OTHER; note = 2'O-methyl-nucleotide
  modified_base 4: mod_base = OTHER; note = 2'O-methyl-nucleotide
  modified_base 5: mod_base = OTHER; note = 2'O-methyl-nucleotide
  modified_base 6: mod_base = OTHER; note = 2'O-methyl-nucleotide
  modified_base 7: mod_base = OTHER; note = 2'O-methyl-nucleotide
  modified_base 8: mod_base = OTHER; note = 2'O-methyl-nucleotide
  modified_base 9: mod_base = OTHER; note = 2'O-methyl-nucleotide
  modified_base 10: mod_base = OTHER; note = 2'fluoro-nucleotide
  modified_base 11: mod_base = OTHER; note = 2'fluoro-nucleotide
  modified_base 12: mod_base = OTHER; note = 2'fluoro-nucleotide
  modified_base 13: mod_base = OTHER; note = 2'O-methyl-nucleotide
  modified_base 14: mod_base = OTHER; note = 2'O-methyl-nucleotide
  modified_base 15: mod_base = OTHER; note = 2'O-methyl-nucleotide
  modified_base 16: mod_base = OTHER; note = 2'O-methyl-nucleotide
  modified_base 17: mod_base = OTHER; note = 2'O-methyl-nucleotide
  modified_base 18: mod_base = OTHER; note = 2'O-methyl-nucleotide
  modified_base 19: mod_base = OTHER; note 1-((2R,3R,4R,5R)-3-((15-((3r,5r,7r)-adamantan-1-yl)pentadec yl)oxy)-4-hydroxy-5-(hydroxymethyl)tetrahydrofuran-2-yl)pyr imidine-2,4(1H,3H)-dione nucleotide
  modified_base 20: mod_base = OTHER; note = 2'O-methyl-nucleotide
  modified_base 21: mod_base = OTHER; note = 2'O-methyl-nucleotide phosphorothioate
  modified_base 22: mod_base = OTHER; note = 2'O-methyl-nucleotide phosphorothioate
  modified_base 23: mod_base = OTHER; note = Inverted abasic nucleotide
natagtctacaaaccagttgaan

SEQ ID NO: 294 - RNA, 21 nt, synthetic construct
  source 1..21: mol_type = other RNA
  modified_base 1: mod_base = OTHER; note = Vinyl phosphonate 2'O-methyl-nucleotide phosphorothioate
  modified_base 2: mod_base = OTHER; note = 2'fluoro-nucleotide phosphorothioate
  modified_base 3: mod_base = OTHER; note = 2'O-methyl-nucleotide phosphorothioate
  modified_base 4: mod_base = OTHER; note = 2'O-methyl-nucleotide
  modified_base 5: mod_base = OTHER; note = 2'O-methyl-nucleotide
  modified_base 6: mod_base = OTHER; note = 2'fluoro-nucleotide
  modified_base 7: mod_base = OTHER; note = 2'O-methyl-nucleotide
  modified_base 8: mod_base = OTHER; note = 2'fluoro-nucleotide
  modified_base 9: mod_base = OTHER; note = 2'fluoro-nucleotide
  modified_base 10: mod_base = OTHER; note = 2'O-methyl-nucleotide
  modified_base 11: mod_base = OTHER; note = 2'O-methyl-nucleotide
  modified_base 12: mod_base = OTHER; note = 2'O-methyl-nucleotide
  modified_base 13: mod_base = OTHER; note = 2'O-methyl-nucleotide
  modified_base 14: mod_base = OTHER; note = 2'fluoro-nucleotide
  modified_base 15: mod_base = OTHER; note = 2'O-methyl-nucleotide
  modified_base 16: mod_base = OTHER; note = 2'fluoro-nucleotide
  modified_base 17: mod_base = OTHER; note = 2'O-methyl-nucleotide
  modified_base 18: mod_base = OTHER; note = 2'O-methyl-nucleotide
  modified_base 19: mod_base = OTHER; note = 2'O-methyl-nucleotide phosphorothioate
  modified_base 20: mod_base = OTHER; note = 2'O-methyl-nucleotide phosphorothioate
  modified_base 21: mod_base = OTHER; note = 2'O-methyl-nucleotide
ttcaactggtttgtagactat

SEQ ID NO: 295 - DNA, 21 bp, synthetic construct
  source 1..21: mol_type = other DNA
aaggtgaaggtcggagtcaac

SEQ ID NO: 296 - DNA, 22 bp, synthetic construct
  source 1..22: mol_type = other DNA
ggggtcattgatggcaacaata

SEQ ID NO: 297 - DNA, 22 bp, synthetic construct
  source 1..22: mol_type = other DNA
tcattgtggaagttttcgagca

SEQ ID NO: 298 - DNA, 21 bp, synthetic construct
  source 1..21: mol_type = other DNA
tgcggtaaccagacagataca

SEQ ID NO: 299 - DNA, 20 bp, synthetic construct
  source 1..20: mol_type = other DNA
cctccaagtgtggctcatta

SEQ ID NO: 300 - DNA, 20 bp, synthetic construct
  source 1..20: mol_type = other DNA
caatcttcgactggactctg

SEQ ID NO: 301 - DNA, 17 bp, synthetic construct
  source 1..17: mol_type = other DNA
cagtggtccgtactcca

SEQ ID NO: 302 - DNA, 20 bp, synthetic construct
  source 1..20: mol_type = other DNA
tggacttgacattcttcagg

SEQ ID NO: 303 - DNA, 20 bp, synthetic construct
  source 1..20: mol_type = other DNA
attgaaacccacaagctgac

SEQ ID NO: 304 - DNA, 20 bp, synthetic construct
  source 1..20: mol_type = other DNA
gaggagacattgctgagatg

SEQ ID NO: 305 - DNA, 20 bp, synthetic construct
  source 1..20: mol_type = other DNA
tcaggtgaactttgaaccag

SEQ ID NO: 306 - DNA, 20 bp, synthetic construct
  source 1..20: mol_type = other DNA
cttccatcacttcgaactcc

SEQ ID NO: 307 - DNA, 21 bp, synthetic construct
  source 1..21: mol_type = other DNA
ccaagtgtggctcattaggca

SEQ ID NO: 308 - DNA, 22 bp, synthetic construct
  source 1..22: mol_type = other DNA
ccaatcttcgactggactctgt

SEQ ID NO: 309 - DNA, 21 bp, synthetic construct
  source 1..21: mol_type = other DNA
gagtccagtcgaagattgggt

SEQ ID NO: 310 - DNA, 21 bp, synthetic construct
  source 1..21: mol_type = other DNA
ggcgagtctaccatgtcgatg

SEQ ID NO: 311 - DNA, 18 bp, synthetic construct
  source 1..18: mol_type = other DNA
caccacagccaccttctc

SEQ ID NO: 312 - DNA, 21 bp, synthetic construct
  source 1..21: mol_type = other DNA
cttccatcacttcgaactcct

SEQ ID NO: 313 - DNA, 19 bp, synthetic construct
  source 1..19: mol_type = other DNA
caagggcagtatcgaccgc

SEQ ID NO: 314 - DNA, 21 bp, synthetic construct
  source 1..21: mol_type = other DNA
gatctcgtcaatgcactggga

SEQ ID NO: 315 - DNA, 21 bp, synthetic construct
  source 1..21: mol_type = other DNA
ctgtggctgatttcactcacc

SEQ ID NO: 316 - DNA, 22 bp, synthetic construct
  source 1..22: mol_type = other DNA
cccactgattaagtgctggttg

SEQ ID NO: 317 - RNA, 19 nt, synthetic construct
  source 1..19: mol_type = other RNA
  modified_base 1: mod_base = OTHER; note = 2'O-methyl-nucleotide phosphorothioate
  modified_base 2: mod_base = OTHER; note = 2'O-methyl-nucleotide phosphorothioate
  modified_base 3: mod_base = OTHER; note = 2'fluoro-nucleotide
  modified_base 4: mod_base = OTHER; note = 2'O-methyl-nucleotide
  modified_base 5: mod_base = OTHER; note = 2'O-methyl-nucleotide
  modified_base 6: mod_base = OTHER; note = 2'O-methyl-nucleotide
  modified_base 7: mod_base = OTHER; note = 2'fluoro-nucleotide
  modified_base 8: mod_base = OTHER; note = 2'fluoro-nucleotide
  modified_base 9: mod_base = OTHER; note = 2'fluoro-nucleotide
  modified_base 10: mod_base = OTHER; note = 2'O-methyl-nucleotide
  modified_base 11: mod_base = OTHER; note = 2'O-methyl-nucleotide
  modified_base 12: mod_base = OTHER; note = 2'fluoro-nucleotide
  modified_base 13: mod_base = OTHER; note = 2'O-methyl-nucleotide
  modified_base 14: mod_base = OTHER; note = 2'O-methyl-nucleotide
  modified_base 15: mod_base = OTHER; note = 2'O-methyl-nucleotide
  modified_base 16: mod_base = OTHER; note = 2'O-methyl-nucleotide
  modified_base 17: mod_base = OTHER; note = 2'fluoro-nucleotide
  modified_base 18: mod_base = OTHER; note = 2'O-methyl-nucleotide
  modified_base 19: mod_base = OTHER; note = 2'O-methyl-Cholesterol-triethylene glycol nucleotide
aagtgtggctcattaggca

SEQ ID NO: 318 - RNA, 21 nt, synthetic construct
  source 1..21: mol_type = other RNA
  modified_base 1: mod_base = OTHER; note = Vinyl phosphonate 2'O-methyl-nucleotide phosphorothioate
  modified_base 2: mod_base = OTHER; note = 2'fluoro-nucleotide phosphorothioate
  modified_base 3: mod_base = OTHER; note = 2'O-methyl-nucleotide
  modified_base 4: mod_base = OTHER; note = 2'O-methyl-nucleotide
  modified_base 5: mod_base = OTHER; note = 2'O-methyl-nucleotide
  modified_base 6: mod_base = OTHER; note = 2'fluoro-nucleotide
  modified_base 7: mod_base = OTHER; note = 2'O-methyl-nucleotide
  modified_base 8: mod_base = OTHER; note = 2'O-methyl-nucleotide
  modified_base 9: mod_base = OTHER; note = 2'O-methyl-nucleotide
  modified_base 10: mod_base = OTHER; note = 2'O-methyl-nucleotide
  modified_base 11: mod_base = OTHER; note = 2'O-methyl-nucleotide
  modified_base 12: mod_base = OTHER; note = 2'O-methyl-nucleotide
  modified_base 13: mod_base = OTHER; note = 2'O-methyl-nucleotide
  modified_base 14: mod_base = OTHER; note = 2'fluoro-nucleotide
  modified_base 15: mod_base = OTHER; note = 2'O-methyl-nucleotide
  modified_base 16: mod_base = OTHER; note = 2'fluoro-nucleotide
  modified_base 17: mod_base = OTHER; note = 2'O-methyl-nucleotide
  modified_base 18: mod_base = OTHER; note = 2'O-methyl-nucleotide
  modified_base 19: mod_base = OTHER; note = 2'O-methyl-nucleotide phosphorothioate
  modified_base 20: mod_base = OTHER; note = 2'O-methyl-nucleotide phosphorothioate
  modified_base 21: mod_base = OTHER; note = 2'O-methyl-nucleotide
tgcctaatgagccacacttgg

SEQ ID NO: 319 - RNA, 19 nt, synthetic construct
  source 1..19: mol_type = other RNA
  modified_base 1: mod_base = OTHER; note = 2'O-methyl-nucleotide phosphorothioate
  modified_base 2: mod_base = OTHER; note = 2'O-methyl-nucleotide phosphorothioate
  modified_base 3: mod_base = OTHER; note = 2'fluoro-nucleotide
  modified_base 4: mod_base = OTHER; note = 2'O-methyl-nucleotide
  modified_base 5: mod_base = OTHER; note = 2'O-methyl-nucleotide
  modified_base 6: mod_base = OTHER; note (2R,3R,4R,5R)-2-(2,4-dioxo-3,4-dihydropyrimidin-1(2H)-yl)-4 -hydroxy-5-(hydroxymethyl)tetrahydrofuran-3-yl hexadecylcarbamate nucleotide
  modified_base 7: mod_base = OTHER; note = 2'fluoro-nucleotide
  modified_base 8: mod_base = OTHER; note = 2'fluoro-nucleotide
  modified_base 9: mod_base = OTHER; note = 2'fluoro-nucleotide
  modified_base 10: mod_base = OTHER; note = 2'O-methyl-nucleotide
  modified_base 11: mod_base = OTHER; note = 2'O-methyl-nucleotide
  modified_base 12: mod_base = OTHER; note = 2'fluoro-nucleotide
  modified_base 13: mod_base = OTHER; note = 2'O-methyl-nucleotide
  modified_base 14: mod_base = OTHER; note = 2'O-methyl-nucleotide
  modified_base 15: mod_base = OTHER; note = 2'O-methyl-nucleotide
  modified_base 16: mod_base = OTHER; note = 2'O-methyl-nucleotide
  modified_base 17: mod_base = OTHER; note = 2'fluoro-nucleotide phosphorothioate
  modified_base 18: mod_base = OTHER; note = 2'O-methyl-nucleotide phosphorothioate
  modified_base 19: mod_base = OTHER; note = 2'O-methyl-nucleotide
aagtgtggctcattaggca

SEQ ID NO: 320 - RNA, 21 nt, synthetic construct
  source 1..21: mol_type = other RNA
  modified_base 1: mod_base = OTHER; note = Vinyl phosphonate 2'O-methyl-nucleotide phosphorothioate
  modified_base 2: mod_base = OTHER; note = 2'fluoro-nucleotide phosphorothioate
  modified_base 3: mod_base = OTHER; note = 2'O-methyl-nucleotide
  modified_base 4: mod_base = OTHER; note = 2'O-methyl-nucleotide
  modified_base 5: mod_base = OTHER; note = 2'O-methyl-nucleotide
  modified_base 6: mod_base = OTHER; note = 2'fluoro-nucleotide
  modified_base 7: mod_base = OTHER; note = 2'O-methyl-nucleotide
  modified_base 8: mod_base = OTHER; note = 2'O-methyl-nucleotide
  modified_base 9: mod_base = OTHER; note = 2'O-methyl-nucleotide
  modified_base 10: mod_base = OTHER; note = 2'O-methyl-nucleotide
  modified_base 11: mod_base = OTHER; note = 2'O-methyl-nucleotide
  modified_base 12: mod_base = OTHER; note = 2'O-methyl-nucleotide
  modified_base 13: mod_base = OTHER; note = 2'O-methyl-nucleotide
  modified_base 14: mod_base = OTHER; note = 2'fluoro-nucleotide
  modified_base 15: mod_base = OTHER; note = 2'O-methyl-nucleotide
  modified_base 16: mod_base = OTHER; note = 2'fluoro-nucleotide
  modified_base 17: mod_base = OTHER; note = 2'O-methyl-nucleotide
  modified_base 18: mod_base = OTHER; note = 2'O-methyl-nucleotide
  modified_base 19: mod_base = OTHER; note = 2'O-methyl-nucleotide phosphorothioate
  modified_base 20: mod_base = OTHER; note = 2'O-methyl-nucleotide phosphorothioate
  modified_base 21: mod_base = OTHER; note = 2'O-methyl-nucleotide
tgcctaatgagccacacttgg

SEQ ID NO: 321 - RNA, 19 nt, synthetic construct
  source 1..19: mol_type = other RNA
  modified_base 1: mod_base = OTHER; note = 2'O-methyl-nucleotide phosphorothioate
  modified_base 2: mod_base = OTHER; note = 2'O-methyl-nucleotide phosphorothioate
  modified_base 3: mod_base = OTHER; note = 2'fluoro-nucleotide
  modified_base 4: mod_base = OTHER; note = 2'O-methyl-nucleotide
  modified_base 5: mod_base = OTHER; note = 2'O-methyl-nucleotide
  modified_base 6: mod_base = OTHER; note = Hexadecyl ((2R,3R,4S,5R)-2-(2,4-dioxo-3,4-dihydropyrimidin-1(2H)-yl)- 4-hydroxy-5-(hydroxymethyl)tetrahydrofuran-3-yl)carbamate nucleotide
  modified_base 7: mod_base = OTHER; note = 2'fluoro-nucleotide
  modified_base 8: mod_base = OTHER; note = 2'fluoro-nucleotide
  modified_base 9: mod_base = OTHER; note = 2'fluoro-nucleotide
  modified_base 10: mod_base = OTHER; note = 2'O-methyl-nucleotide
  modified_base 11: mod_base = OTHER; note = 2'O-methyl-nucleotide
  modified_base 12: mod_base = OTHER; note = 2'fluoro-nucleotide
  modified_base 13: mod_base = OTHER; note = 2'O-methyl-nucleotide
  modified_base 14: mod_base = OTHER; note = 2'O-methyl-nucleotide
  modified_base 15: mod_base = OTHER; note = 2'O-methyl-nucleotide
  modified_base 16: mod_base = OTHER; note = 2'O-methyl-nucleotide
  modified_base 17: mod_base = OTHER; note = 2'fluoro-nucleotide phosphorothioate
  modified_base 18: mod_base = OTHER; note = 2'O-methyl-nucleotide phosphorothioate
  modified_base 19: mod_base = OTHER; note = 2'O-methyl-nucleotide
aagtgtggctcattaggca

SEQ ID NO: 322 - RNA, 21 nt, synthetic construct
  source 1..21: mol_type = other RNA
  modified_base 1: mod_base = OTHER; note = Vinyl phosphonate 2'O-methyl-nucleotide phosphorothioate
  modified_base 2: mod_base = OTHER; note = 2'fluoro-nucleotide phosphorothioate
  modified_base 3: mod_base = OTHER; note = 2'O-methyl-nucleotide
  modified_base 4: mod_base = OTHER; note = 2'O-methyl-nucleotide
  modified_base 5: mod_base = OTHER; note = 2'O-methyl-nucleotide
  modified_base 6: mod_base = OTHER; note = 2'fluoro-nucleotide
  modified_base 7: mod_base = OTHER; note = 2'O-methyl-nucleotide
  modified_base 8: mod_base = OTHER; note = 2'O-methyl-nucleotide
  modified_base 9: mod_base = OTHER; note = 2'O-methyl-nucleotide
  modified_base 10: mod_base = OTHER; note = 2'O-methyl-nucleotide
  modified_base 11: mod_base = OTHER; note = 2'O-methyl-nucleotide
  modified_base 12: mod_base = OTHER; note = 2'O-methyl-nucleotide
  modified_base 13: mod_base = OTHER; note = 2'O-methyl-nucleotide
  modified_base 14: mod_base = OTHER; note = 2'fluoro-nucleotide
  modified_base 15: mod_base = OTHER; note = 2'O-methyl-nucleotide
  modified_base 16: mod_base = OTHER; note = 2'fluoro-nucleotide
  modified_base 17: mod_base = OTHER; note = 2'O-methyl-nucleotide
  modified_base 18: mod_base = OTHER; note = 2'O-methyl-nucleotide
  modified_base 19: mod_base = OTHER; note = 2'O-methyl-nucleotide phosphorothioate
  modified_base 20: mod_base = OTHER; note = 2'O-methyl-nucleotide phosphorothioate
  modified_base 21: mod_base = OTHER; note = 2'O-methyl-nucleotide
tgcctaatgagccacacttgg

SEQ ID NO: 323 - RNA, 19 nt, synthetic construct
  source 1..19: mol_type = other RNA
  modified_base 1: mod_base = OTHER; note = 2'O-methyl-nucleotide phosphorothioate
  modified_base 2: mod_base = OTHER; note = 2'O-methyl-nucleotide phosphorothioate
  modified_base 3: mod_base = OTHER; note = 2'fluoro-nucleotide
  modified_base 4: mod_base = OTHER; note = 2'O-methyl-nucleotide
  modified_base 5: mod_base = OTHER; note = 2'O-methyl-nucleotide
  modified_base 6: mod_base = OTHER; note 3-(((2R,3R,4R,5R)-2-(2,4-dioxo-3,4-dihydropyrimidin-1(2H)-y l)-4-hydroxy-5-(hydroxymethyl)tetrahydrofuran-3-yl)oxy)-N-h exadecylpropanamide nucleotide
  modified_base 7: mod_base = OTHER; note = 2'fluoro-nucleotide
  modified_base 8: mod_base = OTHER; note = 2'fluoro-nucleotide
  modified_base 9: mod_base = OTHER; note = 2'fluoro-nucleotide
  modified_base 10: mod_base = OTHER; note = 2'O-methyl-nucleotide
  modified_base 11: mod_base = OTHER; note = 2'O-methyl-nucleotide
  modified_base 12: mod_base = OTHER; note = 2'fluoro-nucleotide
  modified_base 13: mod_base = OTHER; note = 2'O-methyl-nucleotide
  modified_base 14: mod_base = OTHER; note = 2'O-methyl-nucleotide
  modified_base 15: mod_base = OTHER; note = 2'O-methyl-nucleotide
  modified_base 16: mod_base = OTHER; note = 2'O-methyl-nucleotide
  modified_base 17: mod_base = OTHER; note = 2'fluoro-nucleotide phosphorothioate
  modified_base 18: mod_base = OTHER; note = 2'O-methyl-nucleotide phosphorothioate
  modified_base 19: mod_base = OTHER; note = 2'O-methyl-nucleotide
aagtgtggctcattaggca

SEQ ID NO: 324 - RNA, 21 nt, synthetic construct
  source 1..21: mol_type = other RNA
  modified_base 1: mod_base = OTHER; note = Vinyl phosphonate 2'O-methyl-nucleotide phosphorothioate
  modified_base 2: mod_base = OTHER; note = 2'fluoro-nucleotide phosphorothioate
  modified_base 3: mod_base = OTHER; note = 2'O-methyl-nucleotide
  modified_base 4: mod_base = OTHER; note = 2'O-methyl-nucleotide
  modified_base 5: mod_base = OTHER; note = 2'O-methyl-nucleotide
  modified_base 6: mod_base = OTHER; note = 2'fluoro-nucleotide
  modified_base 7: mod_base = OTHER; note = 2'O-methyl-nucleotide
  modified_base 8: mod_base = OTHER; note = 2'O-methyl-nucleotide
  modified_base 9: mod_base = OTHER; note = 2'O-methyl-nucleotide
  modified_base 10: mod_base = OTHER; note = 2'O-methyl-nucleotide
  modified_base 11: mod_base = OTHER; note = 2'O-methyl-nucleotide
  modified_base 12: mod_base = OTHER; note = 2'O-methyl-nucleotide
  modified_base 13: mod_base = OTHER; note = 2'O-methyl-nucleotide
  modified_base 14: mod_base = OTHER; note = 2'fluoro-nucleotide
  modified_base 15: mod_base = OTHER; note = 2'O-methyl-nucleotide
  modified_base 16: mod_base = OTHER; note = 2'fluoro-nucleotide
  modified_base 17: mod_base = OTHER; note = 2'O-methyl-nucleotide
  modified_base 18: mod_base = OTHER; note = 2'O-methyl-nucleotide
  modified_base 19: mod_base = OTHER; note = 2'O-methyl-nucleotide phosphorothioate
  modified_base 20: mod_base = OTHER; note = 2'O-methyl-nucleotide phosphorothioate
  modified_base 21: mod_base = OTHER; note = 2'O-methyl-nucleotide
tgcctaatgagccacacttgg

SEQ ID NO: 325 - RNA, 19 nt, synthetic construct
  source 1..19: mol_type = other RNA
  modified_base 1: mod_base = OTHER; note = 2'O-methyl-nucleotide phosphorothioate
  modified_base 2: mod_base = OTHER; note = 2'O-methyl-nucleotide phosphorothioate
  modified_base 3: mod_base = OTHER; note = 2'fluoro-nucleotide
  modified_base 4: mod_base = OTHER; note = 2'O-methyl-nucleotide
  modified_base 5: mod_base = OTHER; note = 2'O-methyl-nucleotide
  modified_base 6: mod_base = OTHER; note 1-((2R,3R,4R,5R)-3-(2-(hexadecyloxy)ethoxy)-4-hydroxy-5-(hy droxymethyl)tetrahydrofuran-2-yl)pyrimidine-2,4(1H,3H)-dion e nucleotide
  modified_base 7: mod_base = OTHER; note = 2'fluoro-nucleotide
  modified_base 8: mod_base = OTHER; note = 2'fluoro-nucleotide
  modified_base 9: mod_base = OTHER; note = 2'fluoro-nucleotide
  modified_base 10: mod_base = OTHER; note = 2'O-methyl-nucleotide
  modified_base 11: mod_base = OTHER; note = 2'O-methyl-nucleotide
  modified_base 12: mod_base = OTHER; note = 2'fluoro-nucleotide
  modified_base 13: mod_base = OTHER; note = 2'O-methyl-nucleotide
  modified_base 14: mod_base = OTHER; note = 2'O-methyl-nucleotide
  modified_base 15: mod_base = OTHER; note = 2'O-methyl-nucleotide
  modified_base 16: mod_base = OTHER; note = 2'O-methyl-nucleotide
  modified_base 17: mod_base = OTHER; note = 2'fluoro-nucleotide phosphorothioate
  modified_base 18: mod_base = OTHER; note = 2'O-methyl-nucleotide phosphorothioate
  modified_base 19: mod_base = OTHER; note = 2'O-methyl-nucleotide
aagtgtggctcattaggca

SEQ ID NO: 326 - RNA, 21 nt, synthetic construct
  source 1..21: mol_type = other RNA
  modified_base 1: mod_base = OTHER; note = Vinyl phosphonate 2'O-methyl-nucleotide phosphorothioate
  modified_base 2: mod_base = OTHER; note = 2'fluoro-nucleotide phosphorothioate
  modified_base 3: mod_base = OTHER; note = 2'O-methyl-nucleotide
  modified_base 4: mod_base = OTHER; note = 2'O-methyl-nucleotide
  modified_base 5: mod_base = OTHER; note = 2'O-methyl-nucleotide
  modified_base 6: mod_base = OTHER; note = 2'fluoro-nucleotide
  modified_base 7: mod_base = OTHER; note = 2'O-methyl-nucleotide
  modified_base 8: mod_base = OTHER; note = 2'O-methyl-nucleotide
  modified_base 9: mod_base = OTHER; note = 2'O-methyl-nucleotide
  modified_base 10: mod_base = OTHER; note = 2'O-methyl-nucleotide
  modified_base 11: mod_base = OTHER; note = 2'O-methyl-nucleotide
  modified_base 12: mod_base = OTHER; note = 2'O-methyl-nucleotide
  modified_base 13: mod_base = OTHER; note = 2'O-methyl-nucleotide
  modified_base 14: mod_base = OTHER; note = 2'fluoro-nucleotide
  modified_base 15: mod_base = OTHER; note = 2'O-methyl-nucleotide
  modified_base 16: mod_base = OTHER; note = 2'fluoro-nucleotide
  modified_base 17: mod_base = OTHER; note = 2'O-methyl-nucleotide
  modified_base 18: mod_base = OTHER; note = 2'O-methyl-nucleotide
  modified_base 19: mod_base = OTHER; note = 2'O-methyl-nucleotide phosphorothioate
  modified_base 20: mod_base = OTHER; note = 2'O-methyl-nucleotide phosphorothioate
  modified_base 21: mod_base = OTHER; note = 2'O-methyl-nucleotide
tgcctaatgagccacacttgg

SEQ ID NO: 327 - RNA, 19 nt, synthetic construct
  source 1..19: mol_type = other RNA
  modified_base 1: mod_base = OTHER; note = 2'O-methyl-nucleotide phosphorothioate
  modified_base 2: mod_base = OTHER; note = 2'O-methyl-nucleotide phosphorothioate
  modified_base 3: mod_base = OTHER; note = 2'fluoro-nucleotide
  modified_base 4: mod_base = OTHER; note = 2'O-methyl-nucleotide
  modified_base 5: mod_base = OTHER; note = 2'O-methyl-nucleotide
  modified_base 6: mod_base = OTHER; note 1-((2R,3R,4R,5R)-3-((15-((3r,5r,7r)-adamantan-1-yl)pentadec yl)oxy)-4-hydroxy-5-(hydroxymethyl)tetrahydrofuran-2-yl)pyr imidine-2,4(1H,3H)-dione nucleotide
  modified_base 7: mod_base = OTHER; note = 2'fluoro-nucleotide
  modified_base 8: mod_base = OTHER; note = 2'fluoro-nucleotide
  modified_base 9: mod_base = OTHER; note = 2'fluoro-nucleotide
  modified_base 10: mod_base = OTHER; note = 2'O-methyl-nucleotide
  modified_base 11: mod_base = OTHER; note = 2'O-methyl-nucleotide
  modified_base 12: mod_base = OTHER; note = 2'fluoro-nucleotide
  modified_base 13: mod_base = OTHER; note = 2'O-methyl-nucleotide
  modified_base 14: mod_base = OTHER; note = 2'O-methyl-nucleotide
  modified_base 15: mod_base = OTHER; note = 2'O-methyl-nucleotide
  modified_base 16: mod_base = OTHER; note = 2'O-methyl-nucleotide
  modified_base 17: mod_base = OTHER; note = 2'fluoro-nucleotide phosphorothioate
  modified_base 18: mod_base = OTHER; note = 2'O-methyl-nucleotide phosphorothioate
  modified_base 19: mod_base = OTHER; note = 2'O-methyl-nucleotide
aagtgtggctcattaggca

SEQ ID NO: 328 - RNA, 21 nt, synthetic construct
  source 1..21: mol_type = other RNA
  modified_base 1: mod_base = OTHER; note = Vinyl phosphonate 2'O-methyl-nucleotide phosphorothioate
  modified_base 2: mod_base = OTHER; note = 2'fluoro-nucleotide phosphorothioate
  modified_base 3: mod_base = OTHER; note = 2'O-methyl-nucleotide
  modified_base 4: mod_base = OTHER; note = 2'O-methyl-nucleotide
  modified_base 5: mod_base = OTHER; note = 2'O-methyl-nucleotide
  modified_base 6: mod_base = OTHER; note = 2'fluoro-nucleotide
  modified_base 7: mod_base = OTHER; note = 2'O-methyl-nucleotide
  modified_base 8: mod_base = OTHER; note = 2'O-methyl-nucleotide
  modified_base 9: mod_base = OTHER; note = 2'O-methyl-nucleotide
  modified_base 10: mod_base = OTHER; note = 2'O-methyl-nucleotide
  modified_base 11: mod_base = OTHER; note = 2'O-methyl-nucleotide
  modified_base 12: mod_base = OTHER; note = 2'O-methyl-nucleotide
  modified_base 13: mod_base = OTHER; note = 2'O-methyl-nucleotide
  modified_base 14: mod_base = OTHER; note = 2'fluoro-nucleotide
  modified_base 15: mod_base = OTHER; note = 2'O-methyl-nucleotide
  modified_base 16: mod_base = OTHER; note = 2'fluoro-nucleotide
  modified_base 17: mod_base = OTHER; note = 2'O-methyl-nucleotide
  modified_base 18: mod_base = OTHER; note = 2'O-methyl-nucleotide
  modified_base 19: mod_base = OTHER; note = 2'O-methyl-nucleotide phosphorothioate
  modified_base 20: mod_base = OTHER; note = 2'O-methyl-nucleotide phosphorothioate
  modified_base 21: mod_base = OTHER; note = 2'O-methyl-nucleotide
tgcctaatgagccacacttgg

SEQ ID NO: 329 - RNA, 22 nt, synthetic construct
  source 1..22: mol_type = other RNA
  modified_base 1: mod_base = OTHER; note = Inverted abasic nucleotide phosphorothioate
  modified_base 2: mod_base = OTHER; note = 2'O-methyl-nucleotide phosphorothioate
  modified_base 3: mod_base = OTHER; note = 2'O-methyl-nucleotide
  modified_base 4: mod_base = OTHER; note = 2'O-methyl-nucleotide
  modified_base 5: mod_base = OTHER; note = 2'O-methyl-nucleotide
  modified_base 6: mod_base = OTHER; note = 2'O-methyl-nucleotide
  modified_base 7: mod_base = OTHER; note (2R,3R,4R,5R)-2-(2,4-dioxo-3,4-dihydropyrimidin-1(2H)-yl)-4 -hydroxy-5-(hydroxymethyl)tetrahydrofuran-3-yl hexadecylcarbamate nucleotide
  modified_base 8: mod_base = OTHER; note = 2'fluoro-nucleotide
  modified_base 9: mod_base = OTHER; note = 2'O-methyl-nucleotide
  modified_base 10: mod_base = OTHER; note = 2'fluoro-nucleotide
  modified_base 11: mod_base = OTHER; note = 2'fluoro-nucleotide
  modified_base 12: mod_base = OTHER; note = 2'fluoro-nucleotide
  modified_base 13: mod_base = OTHER; note = 2'O-methyl-nucleotide
  modified_base 14: mod_base = OTHER; note = 2'O-methyl-nucleotide
  modified_base 15: mod_base = OTHER; note = 2'O-methyl-nucleotide
  modified_base 16: mod_base = OTHER; note = 2'O-methyl-nucleotide
  modified_base 17: mod_base = OTHER; note = 2'O-methyl-nucleotide
  modified_base 18: mod_base = OTHER; note = 2'O-methyl-nucleotide
  modified_base 19: mod_base = OTHER; note = 2'O-methyl-nucleotide
  modified_base 20: mod_base = OTHER; note = 2'O-methyl-nucleotide phosphorothioate
  modified_base 21: mod_base = OTHER; note = 2'O-methyl-nucleotide phosphorothioate
  modified_base 22: mod_base = OTHER; note = 2'O-methyl-nucleotide
ngaagatcacgctgggacgtaa

SEQ ID NO: 330 - RNA, 23 nt, synthetic construct
  source 1..23: mol_type = other RNA
  modified_base 1: mod_base = OTHER; note = Vinyl phosphonate 2'O-methyl-nucleotide phosphorothioate
  modified_base 2: mod_base = OTHER; note = 2'fluoro-nucleotide phosphorothioate
  modified_base 3: mod_base = OTHER; note = 2'O-methyl-nucleotide
  modified_base 4: mod_base = OTHER; note = 2'O-methyl-nucleotide
  modified_base 5: mod_base = OTHER; note = 2'O-methyl-nucleotide
  modified_base 6: mod_base = OTHER; note = 2'fluoro-nucleotide
  modified_base 7: mod_base = OTHER; note = 2'O-methyl-nucleotide
  modified_base 8: mod_base = OTHER; note = 2'fluoro-nucleotide
  modified_base 9: mod_base = OTHER; note = 2'fluoro-nucleotide
  modified_base 10: mod_base = OTHER; note = 2'O-methyl-nucleotide
  modified_base 11: mod_base = OTHER; note = 2'O-methyl-nucleotide
  modified_base 12: mod_base = OTHER; note = 2'O-methyl-nucleotide
  modified_base 13: mod_base = OTHER; note = 2'O-methyl-nucleotide
  modified_base 14: mod_base = OTHER; note = 2'fluoro-nucleotide
  modified_base 15: mod_base = OTHER; note = 2'O-methyl-nucleotide
  modified_base 16: mod_base = OTHER; note = 2'fluoro-nucleotide
  modified_base 17: mod_base = OTHER; note = 2'O-methyl-nucleotide
  modified_base 18: mod_base = OTHER; note = 2'O-methyl-nucleotide
  modified_base 19: mod_base = OTHER; note = 2'O-methyl-nucleotide
  modified_base 20: mod_base = OTHER; note = 2'O-methyl-nucleotide
  modified_base 21: mod_base = OTHER; note = 2'O-methyl-nucleotide phosphorothioate
  modified_base 22: mod_base = OTHER; note = 2'O-methyl-nucleotide phosphorothioate
  modified_base 23: mod_base = OTHER; note = 2'O-methyl-nucleotide
ttacgtcccagcgtgatcttcca

SEQ ID NO: 331 - RNA, 23 nt, synthetic construct
  source 1..23: mol_type = other RNA
  modified_base 1: mod_base = OTHER; note = Inverted abasic nucleotide phosphorothioate
  modified_base 2: mod_base = OTHER; note = 2'O-methyl-nucleotide phosphorothioate
  modified_base 3: mod_base = OTHER; note = 2'O-methyl-nucleotide
  modified_base 4: mod_base = OTHER; note = 2'O-methyl-nucleotide
  modified_base 5: mod_base = OTHER; note = 2'O-methyl-nucleotide
  modified_base 6: mod_base = OTHER; note = 2'O-methyl-nucleotide
  modified_base 7: mod_base = OTHER; note = 2'O-methyl-nucleotide
  modified_base 8: mod_base = OTHER; note (2R,3R,4R,5R)-2-(4-amino-2-oxopyrimidin-1(2H)-yl)-4-hydroxy -5-(hydroxymethyl)tetrahydrofuran-3-yl hexadecylcarbamate nucleotide
  modified_base 9: mod_base = OTHER; note = 2'O-methyl-nucleotide
  modified_base 10: mod_base = OTHER; note = 2'fluoro-nucleotide
  modified_base 11: mod_base = OTHER; note = 2'fluoro-nucleotide
  modified_base 12: mod_base = OTHER; note = 2'fluoro-nucleotide
  modified_base 13: mod_base = OTHER; note = 2'O-methyl-nucleotide
  modified_base 14: mod_base = OTHER; note = 2'O-methyl-nucleotide
  modified_base 15: mod_base = OTHER; note = 2'O-methyl-nucleotide
  modified_base 16: mod_base = OTHER; note = 2'O-methyl-nucleotide
  modified_base 17: mod_base = OTHER; note = 2'O-methyl-nucleotide
  modified_base 18: mod_base = OTHER; note = 2'O-methyl-nucleotide
  modified_base 19: mod_base = OTHER; note = 2'O-methyl-nucleotide
  modified_base 20: mod_base = OTHER; note = 2'O-methyl-nucleotide
  modified_base 21: mod_base = OTHER; note = 2'O-methyl-nucleotide phosphorothioate
  modified_base 22: mod_base = OTHER; note = 2'O-methyl-nucleotide phosphorothioate
  modified_base 23: mod_base = OTHER; note = Inverted abasic nucleotide
ngaagatcacgctgggacgtaan

SEQ ID NO: 332 - DNA, 21 bp, synthetic construct
  source 1..21: mol_type = other DNA
  modified_base 1: mod_base = OTHER; note = Vinyl phosphonate 2'O-methyl-nucleotide phosphorothioate
  modified_base 2: mod_base = OTHER; note = 2'fluoro-nucleotide phosphorothioate
  modified_base 3: mod_base = OTHER; note = 2'O-methyl-nucleotide
  modified_base 4: mod_base = OTHER; note = 2'O-methyl-nucleotide
  modified_base 5: mod_base = OTHER; note = 2'O-methyl-nucleotide
  modified_base 6: mod_base = OTHER; note = 2'O-methyl-nucleotide
  modified_base 8: mod_base = OTHER; note = 2'O-methyl-nucleotide
  modified_base 9: mod_base = OTHER; note = 2'O-methyl-nucleotide
  modified_base 10: mod_base = OTHER; note = 2'O-methyl-nucleotide
  modified_base 11: mod_base = OTHER; note = 2'O-methyl-nucleotide
  modified_base 12: mod_base = OTHER; note = 2'O-methyl-nucleotide
  modified_base 13: mod_base = OTHER; note = 2'O-methyl-nucleotide
  modified_base 14: mod_base = OTHER; note = 2'fluoro-nucleotide
  modified_base 15: mod_base = OTHER; note = 2'O-methyl-nucleotide
  modified_base 16: mod_base = OTHER; note = 2'fluoro-nucleotide
  modified_base 17: mod_base = OTHER; note = 2'O-methyl-nucleotide
  modified_base 18: mod_base = OTHER; note = 2'O-methyl-nucleotide
  modified_base 19: mod_base = OTHER; note = 2'O-methyl-nucleotide phosphorothioate
  modified_base 20: mod_base = OTHER; note = 2'O-methyl-nucleotide phosphorothioate
  modified_base 21: mod_base = OTHER; note = 2'O-methyl-nucleotide
  misc_feature 1..6: note = RNA
  misc_feature 7: note = DNA
  misc_feature 8..21: note = RNA
ttacgtcccagcgtgatcttc

SEQ ID NO: 333 - RNA, 23 nt, synthetic construct
  source 1..23: mol_type = other RNA
  modified_base 1: mod_base = OTHER; note = Inverted abasic nucleotide phosphorothioate
  modified_base 2: mod_base = OTHER; note = 2'O-methyl-nucleotide phosphorothioate
  modified_base 3: mod_base = OTHER; note = 2'O-methyl-nucleotide
  modified_base 4: mod_base = OTHER; note = 2'O-methyl-nucleotide
  modified_base 5: mod_base = OTHER; note = 2'O-methyl-nucleotide
  modified_base 6: mod_base = OTHER; note = 2'O-methyl-nucleotide
  modified_base 7: mod_base = OTHER; note = 2'O-methyl-nucleotide
  modified_base 8: mod_base = OTHER; note (2R,3R,4R,5R)-2-(4-amino-2-oxopyrimidin-1(2H)-yl)-4-hydroxy -5-(hydroxymethyl)tetrahydrofuran-3-yl hexadecylcarbamate nucleotide
  modified_base 9: mod_base = OTHER; note = 2'O-methyl-nucleotide
  modified_base 10: mod_base = OTHER; note = 2'fluoro-nucleotide
  modified_base 11: mod_base = OTHER; note = 2'fluoro-nucleotide
  modified_base 12: mod_base = OTHER; note = 2'fluoro-nucleotide
  modified_base 13: mod_base = OTHER; note = 2'O-methyl-nucleotide
  modified_base 14: mod_base = OTHER; note = 2'O-methyl-nucleotide
  modified_base 15: mod_base = OTHER; note = 2'O-methyl-nucleotide
  modified_base 16: mod_base = OTHER; note = 2'O-methyl-nucleotide
  modified_base 17: mod_base = OTHER; note = 2'O-methyl-nucleotide
  modified_base 18: mod_base = OTHER; note = 2'O-methyl-nucleotide
  modified_base 19: mod_base = OTHER; note = 2'O-methyl-nucleotide
  modified_base 20: mod_base = OTHER; note = 2'O-methyl-nucleotide
  modified_base 21: mod_base = OTHER; note = 2'O-methyl-nucleotide phosphorothioate
  modified_base 22: mod_base = OTHER; note = 2'O-methyl-nucleotide phosphorothioate
  modified_base 23: mod_base = OTHER; note = Inverted abasic nucleotide
ncaagtccaagatcggctccaan

SEQ ID NO: 334 - DNA, 21 bp, synthetic construct
  source 1..21: mol_type = other DNA
  modified_base 1: mod_base = OTHER; note = Vinyl phosphonate 2'O-methyl-nucleotide phosphorothioate
  modified_base 2: mod_base = OTHER; note = 2'fluoro-nucleotide phosphorothioate
  modified_base 3: mod_base = OTHER; note = 2'O-methyl-nucleotide
  modified_base 4: mod_base = OTHER; note = 2'O-methyl-nucleotide
  modified_base 5: mod_base = OTHER; note = 2'O-methyl-nucleotide
  modified_base 6: mod_base = OTHER; note = 2'O-methyl-nucleotide
  modified_base 8: mod_base = OTHER; note = 2'O-methyl-nucleotide
  modified_base 9: mod_base = OTHER; note = 2'O-methyl-nucleotide
  modified_base 10: mod_base = OTHER; note = 2'O-methyl-nucleotide
  modified_base 11: mod_base = OTHER; note = 2'O-methyl-nucleotide
  modified_base 12: mod_base = OTHER; note = 2'O-methyl-nucleotide
  modified_base 13: mod_base = OTHER; note = 2'O-methyl-nucleotide
  modified_base 14: mod_base = OTHER; note = 2'fluoro-nucleotide
  modified_base 15: mod_base = OTHER; note = 2'O-methyl-nucleotide
  modified_base 16: mod_base = OTHER; note = 2'fluoro-nucleotide
  modified_base 17: mod_base = OTHER; note = 2'O-methyl-nucleotide
  modified_base 18: mod_base = OTHER; note = 2'O-methyl-nucleotide
  modified_base 19: mod_base = OTHER; note = 2'O-methyl-nucleotide phosphorothioate
  modified_base 20: mod_base = OTHER; note = 2'O-methyl-nucleotide phosphorothioate
  modified_base 21: mod_base = OTHER; note = 2'O-methyl-nucleotide
  misc_feature 1..6: note = RNA
  misc_feature 7: note = DNA
  misc_feature 8..21: note = RNA
ttggagccgatcttggacttg

SEQ ID NO: 335 - RNA, 22 nt, synthetic construct
  source 1..22: mol_type = other RNA
  modified_base 1: mod_base = OTHER; note = Inverted abasic nucleotide phosphorothioate
  modified_base 2: mod_base = OTHER; note = 2'O-methyl-nucleotide phosphorothioate
  modified_base 3: mod_base = OTHER; note = 2'O-methyl-nucleotide
  modified_base 4: mod_base = OTHER; note = 2'O-methyl-nucleotide
  modified_base 5: mod_base = OTHER; note = 2'O-methyl-nucleotide
  modified_base 6: mod_base = OTHER; note = 2'O-methyl-nucleotide
  modified_base 7: mod_base = OTHER; note (2R,3R,4R,5R)-2-(6-amino-9H-purin-9-yl)-4-hydroxy-5-(hydrox ymethyl)tetrahydrofuran-3-yl hexadecylcarbamate nucleotide
  modified_base 8: mod_base = OTHER; note = 2'fluoro-nucleotide
  modified_base 9: mod_base = OTHER; note = 2'O-methyl-nucleotide
  modified_base 10: mod_base = OTHER; note = 2'fluoro-nucleotide
  modified_base 11: mod_base = OTHER; note = 2'fluoro-nucleotide
  modified_base 12: mod_base = OTHER; note = 2'fluoro-nucleotide
  modified_base 13: mod_base = OTHER; note = 2'O-methyl-nucleotide
  modified_base 14: mod_base = OTHER; note = 2'O-methyl-nucleotide
  modified_base 15: mod_base = OTHER; note = 2'O-methyl-nucleotide
  modified_base 16: mod_base = OTHER; note = 2'O-methyl-nucleotide
  modified_base 17: mod_base = OTHER; note = 2'O-methyl-nucleotide
  modified_base 18: mod_base = OTHER; note = 2'O-methyl-nucleotide
  modified_base 19: mod_base = OTHER; note = 2'O-methyl-nucleotide
  modified_base 20: mod_base = OTHER; note = 2'O-methyl-nucleotide phosphorothioate
  modified_base 21: mod_base = OTHER; note = 2'O-methyl-nucleotide phosphorothioate
  modified_base 22: mod_base = OTHER; note = 2'O-methyl-nucleotide
ntgcaaatagtctacaaaccaa

SEQ ID NO: 336 - RNA, 23 nt, synthetic construct
  source 1..23: mol_type = other RNA
  modified_base 1: mod_base = OTHER; note = Vinyl phosphonate 2'O-methyl-nucleotide phosphorothioate
  modified_base 2: mod_base = OTHER; note = 2'fluoro-nucleotide phosphorothioate
  modified_base 3: mod_base = OTHER; note = 2'O-methyl-nucleotide
  modified_base 4: mod_base = OTHER; note = 2'O-methyl-nucleotide
  modified_base 5: mod_base = OTHER; note = 2'O-methyl-nucleotide
  modified_base 6: mod_base = OTHER; note = 2'fluoro-nucleotide
  modified_base 7: mod_base = OTHER; note = 2'O-methyl-nucleotide
  modified_base 8: mod_base = OTHER; note = 2'fluoro-nucleotide
  modified_base 9: mod_base = OTHER; note = 2'fluoro-nucleotide
  modified_base 10: mod_base = OTHER; note = 2'O-methyl-nucleotide
  modified_base 11: mod_base = OTHER; note = 2'O-methyl-nucleotide
  modified_base 12: mod_base = OTHER; note = 2'O-methyl-nucleotide
  modified_base 13: mod_base = OTHER; note = 2'O-methyl-nucleotide
  modified_base 14: mod_base = OTHER; note = 2'fluoro-nucleotide
  modified_base 15: mod_base = OTHER; note = 2'O-methyl-nucleotide
  modified_base 16: mod_base = OTHER; note = 2'fluoro-nucleotide
  modified_base 17: mod_base = OTHER; note = 2'O-methyl-nucleotide
  modified_base 18: mod_base = OTHER; note = 2'O-methyl-nucleotide
  modified_base 19: mod_base = OTHER; note = 2'O-methyl-nucleotide
  modified_base 20: mod_base = OTHER; note = 2'O-methyl-nucleotide
  modified_base 21: mod_base = OTHER; note = 2'O-methyl-nucleotide phosphorothioate
  modified_base 22: mod_base = OTHER; note = 2'O-methyl-nucleotide phosphorothioate
  modified_base 23: mod_base = OTHER; note = 2'O-methyl-nucleotide
ttggtttgtagactatttgcaca

SEQ ID NO: 337 - RNA, 23 nt, synthetic construct
  source 1..23: mol_type = other RNA
  modified_base 1: mod_base = OTHER; note = Inverted abasic nucleotide phosphorothioate
  modified_base 2: mod_base = OTHER; note = 2'O-methyl-nucleotide phosphorothioate
  modified_base 3: mod_base = OTHER; note = 2'O-methyl-nucleotide
  modified_base 4: mod_base = OTHER; note = 2'O-methyl-nucleotide
  modified_base 5: mod_base = OTHER; note = 2'O-methyl-nucleotide
  modified_base 6: mod_base = OTHER; note = 2'O-methyl-nucleotide
  modified_base 7: mod_base = OTHER; note = 2'O-methyl-nucleotide
  modified_base 8: mod_base = OTHER; note (2R,3R,4R,5R)-2-(2,4-dioxo-3,4-dihydropyrimidin-1(2H)-yl)-4 -hydroxy-5-(hydroxymethyl)tetrahydrofuran-3-yl hexadecylcarbamate nucleotide
  modified_base 9: mod_base = OTHER; note = 2'O-methyl-nucleotide
  modified_base 10: mod_base = OTHER; note = 2'fluoro-nucleotide
  modified_base 11: mod_base = OTHER; note = 2'fluoro-nucleotide
  modified_base 12: mod_base = OTHER; note = 2'fluoro-nucleotide
  modified_base 13: mod_base = OTHER; note = 2'O-methyl-nucleotide
  modified_base 14: mod_base = OTHER; note = 2'O-methyl-nucleotide
  modified_base 15: mod_base = OTHER; note = 2'O-methyl-nucleotide
  modified_base 16: mod_base = OTHER; note = 2'O-methyl-nucleotide
  modified_base 17: mod_base = OTHER; note = 2'O-methyl-nucleotide
  modified_base 18: mod_base = OTHER; note = 2'O-methyl-nucleotide
  modified_base 19: mod_base = OTHER; note = 2'O-methyl-nucleotide
  modified_base 20: mod_base = OTHER; note = 2'O-methyl-nucleotide
  modified_base 21: mod_base = OTHER; note = 2'O-methyl-nucleotide phosphorothioate
  modified_base 22: mod_base = OTHER; note = 2'O-methyl-nucleotide phosphorothioate
  modified_base 23: mod_base = OTHER; note = Inverted abasic nucleotide
ntgcaaatagtctacaaaccaan

SEQ ID NO: 338 - RNA, 21 nt, synthetic construct
  source 1..21: mol_type = other RNA
  modified_base 1: mod_base = OTHER; note = Vinyl phosphonate 2'O-methyl-nucleotide phosphorothioate
  modified_base 2: mod_base = OTHER; note = 2'fluoro-nucleotide phosphorothioate
  modified_base 3: mod_base = OTHER; note = 2'O-methyl-nucleotide phosphorothioate
  modified_base 4: mod_base = OTHER; note = 2'fluoro-nucleotide
  modified_base 5: mod_base = OTHER; note = 2'O-methyl-nucleotide
  modified_base 6: mod_base = OTHER; note = 2'fluoro-nucleotide
  modified_base 7: mod_base = OTHER; note = 2'O-methyl-nucleotide
  modified_base 8: mod_base = OTHER; note = 2'fluoro-nucleotide
  modified_base 9: mod_base = OTHER; note = 2'O-methyl-nucleotide
  modified_base 10: mod_base = OTHER; note = 2'fluoro-nucleotide
  modified_base 11: mod_base = OTHER; note = 2'O-methyl-nucleotide
  modified_base 12: mod_base = OTHER; note = 2'fluoro-nucleotide
  modified_base 13: mod_base = OTHER; note = 2'O-methyl-nucleotide
  modified_base 14: mod_base = OTHER; note = 2'fluoro-nucleotide
  modified_base 15: mod_base = OTHER; note = 2'O-methyl-nucleotide
  modified_base 16: mod_base = OTHER; note = 2'fluoro-nucleotide
  modified_base 17: mod_base = OTHER; note = 2'O-methyl-nucleotide
  modified_base 18: mod_base = OTHER; note = 2'fluoro-nucleotide
  modified_base 19: mod_base = OTHER; note = 2'O-methyl-nucleotide
  modified_base 20: mod_base = OTHER; note = 2'O-methyl-nucleotide phosphorothioate
  modified_base 21: mod_base = OTHER; note = 2'O-methyl-nucleotide
ttggtttgtagactatttgca

SEQ ID NO: 339 - RNA, 23 nt, synthetic construct
  source 1..23: mol_type = other RNA
  modified_base 1: mod_base = OTHER; note = Inverted abasic nucleotide phosphorothioate
  modified_base 2: mod_base = OTHER; note = 2'O-methyl-nucleotide phosphorothioate
  modified_base 3: mod_base = OTHER; note = 2'O-methyl-nucleotide
  modified_base 4: mod_base = OTHER; note = 2'O-methyl-nucleotide
  modified_base 5: mod_base = OTHER; note = 2'O-methyl-nucleotide
  modified_base 6: mod_base = OTHER; note = 2'O-methyl-nucleotide
  modified_base 7: mod_base = OTHER; note = 2'O-methyl-nucleotide
  modified_base 8: mod_base = OTHER; note (2R,3R,4R,5R)-2-(2,4-dioxo-3,4-dihydropyrimidin-1(2H)-yl)-4 -hydroxy-5-(hydroxymethyl)tetrahydrofuran-3-yl hexadecylcarbamate nucleotide
  modified_base 9: mod_base = OTHER; note = 2'O-methyl-nucleotide
  modified_base 10: mod_base = OTHER; note = 2'fluoro-nucleotide
  modified_base 11: mod_base = OTHER; note = 2'fluoro-nucleotide
  modified_base 12: mod_base = OTHER; note = 2'fluoro-nucleotide
  modified_base 13: mod_base = OTHER; note = 2'O-methyl-nucleotide
  modified_base 14: mod_base = OTHER; note = 2'O-methyl-nucleotide
  modified_base 15: mod_base = OTHER; note = 2'O-methyl-nucleotide
  modified_base 16: mod_base = OTHER; note = 2'O-methyl-nucleotide
  modified_base 17: mod_base = OTHER; note = 2'O-methyl-nucleotide
  modified_base 18: mod_base = OTHER; note = 2'O-methyl-nucleotide
  modified_base 19: mod_base = OTHER; note = 2'O-methyl-nucleotide
  modified_base 20: mod_base = OTHER; note = 2'O-methyl-nucleotide
  modified_base 21: mod_base = OTHER; note = 2'O-methyl-nucleotide phosphorothioate
  modified_base 22: mod_base = OTHER; note = 2'O-methyl-nucleotide phosphorothioate
  modified_base 23: mod_base = OTHER; note = Inverted abasic nucleotide
ntgcaaatagtctacaaaccaan

SEQ ID NO: 340 - RNA, 21 nt, synthetic construct
  source 1..21: mol_type = other RNA
  modified_base 1: mod_base = OTHER; note = Vinyl phosphonate 2'O-methyl-nucleotide phosphorothioate
  modified_base 2: mod_base = OTHER; note = 2'fluoro-nucleotide phosphorothioate
  modified_base 3: mod_base = OTHER; note = 2'O-methyl-nucleotide
  modified_base 4: mod_base = OTHER; note = 2'O-methyl-nucleotide
  modified_base 5: mod_base = OTHER; note = 2'O-methyl-nucleotide
  modified_base 6: mod_base = OTHER; note = 2'fluoro-nucleotide
  modified_base 7: mod_base = OTHER; note = 2'O-methyl-nucleotide
  modified_base 8: mod_base = OTHER; note = 2'fluoro-nucleotide
  modified_base 9: mod_base = OTHER; note = 2'fluoro-nucleotide
  modified_base 10: mod_base = OTHER; note = 2'O-methyl-nucleotide
  modified_base 11: mod_base = OTHER; note = 2'O-methyl-nucleotide
  modified_base 12: mod_base = OTHER; note = 2'O-methyl-nucleotide
  modified_base 13: mod_base = OTHER; note = 2'O-methyl-nucleotide
  modified_base 14: mod_base = OTHER; note = 2'fluoro-nucleotide
  modified_base 15: mod_base = OTHER; note = 2'O-methyl-nucleotide
  modified_base 16: mod_base = OTHER; note = 2'fluoro-nucleotide
  modified_base 17: mod_base = OTHER; note = 2'O-methyl-nucleotide
  modified_base 18: mod_base = OTHER; note = 2'O-methyl-nucleotide
  modified_base 19: mod_base = OTHER; note = 2'O-methyl-nucleotide phosphorothioate
  modified_base 20: mod_base = OTHER; note = 2'O-methyl-nucleotide phosphorothioate
  modified_base 21: mod_base = OTHER; note = 2'O-methyl-nucleotide
ttggtttgtagactatttgca

SEQ ID NO: 341 - RNA, 23 nt, synthetic construct
  source 1..23: mol_type = other RNA
  modified_base 1: mod_base = OTHER; note = Inverted abasic nucleotide phosphorothioate
  modified_base 2: mod_base = OTHER; note = 2'O-methyl-nucleotide phosphorothioate
  modified_base 3: mod_base = OTHER; note = 2'O-methyl-nucleotide
  modified_base 4: mod_base = OTHER; note = 2'O-methyl-nucleotide
  modified_base 5: mod_base = OTHER; note = 2'O-methyl-nucleotide
  modified_base 6: mod_base = OTHER; note = 2'O-methyl-nucleotide
  modified_base 7: mod_base = OTHER; note = 2'O-methyl-nucleotide
  modified_base 8: mod_base = OTHER; note (2R,3R,4R,5R)-2-(2,4-dioxo-3,4-dihydropyrimidin-1(2H)-yl)-4 -hydroxy-5-(hydroxymethyl)tetrahydrofuran-3-yl hexadecylcarbamate nucleotide
  modified_base 9: mod_base = OTHER; note = 2'O-methyl-nucleotide
  modified_base 10: mod_base = OTHER; note = 2'fluoro-nucleotide
  modified_base 11: mod_base = OTHER; note = 2'fluoro-nucleotide
  modified_base 12: mod_base = OTHER; note = 2'fluoro-nucleotide
  modified_base 13: mod_base = OTHER; note = 2'O-methyl-nucleotide
  modified_base 14: mod_base = OTHER; note = 2'O-methyl-nucleotide
  modified_base 15: mod_base = OTHER; note = 2'O-methyl-nucleotide
  modified_base 16: mod_base = OTHER; note = 2'O-methyl-nucleotide
  modified_base 17: mod_base = OTHER; note = 2'O-methyl-nucleotide
  modified_base 18: mod_base = OTHER; note = 2'O-methyl-nucleotide
  modified_base 19: mod_base = OTHER; note = 2'O-methyl-nucleotide
  modified_base 20: mod_base = OTHER; note = 2'O-methyl-nucleotide
  modified_base 21: mod_base = OTHER; note = 2'O-methyl-nucleotide phosphorothioate
  modified_base 22: mod_base = OTHER; note = 2'O-methyl-nucleotide phosphorothioate
  modified_base 23: mod_base = OTHER; note = Inverted abasic nucleotide
ntgcaaatagtctacaaaccaan

SEQ ID NO: 342 - DNA, 21 bp, synthetic construct
  source 1..21: mol_type = other DNA
  modified_base 1: mod_base = OTHER; note = Vinyl phosphonate 2'O-methyl-nucleotide phosphorothioate
  modified_base 2: mod_base = OTHER; note = 2'fluoro-nucleotide phosphorothioate
  modified_base 3: mod_base = OTHER; note = 2'O-methyl-nucleotide
  modified_base 4: mod_base = OTHER; note = 2'O-methyl-nucleotide
  modified_base 5: mod_base = OTHER; note = 2'O-methyl-nucleotide
  modified_base 6: mod_base = OTHER; note = 2'O-methyl-nucleotide
  modified_base 8: mod_base = OTHER; note = 2'O-methyl-nucleotide
  modified_base 9: mod_base = OTHER; note = 2'O-methyl-nucleotide
  modified_base 10: mod_base = OTHER; note = 2'O-methyl-nucleotide
  modified_base 11: mod_base = OTHER; note = 2'O-methyl-nucleotide
  modified_base 12: mod_base = OTHER; note = 2'O-methyl-nucleotide
  modified_base 13: mod_base = OTHER; note = 2'O-methyl-nucleotide
  modified_base 14: mod_base = OTHER; note = 2'fluoro-nucleotide
  modified_base 15: mod_base = OTHER; note = 2'O-methyl-nucleotide
  modified_base 16: mod_base = OTHER; note = 2'fluoro-nucleotide
  modified_base 17: mod_base = OTHER; note = 2'O-methyl-nucleotide
  modified_base 18: mod_base = OTHER; note = 2'O-methyl-nucleotide
  modified_base 19: mod_base = OTHER; note = 2'O-methyl-nucleotide phosphorothioate
  modified_base 20: mod_base = OTHER; note = 2'O-methyl-nucleotide phosphorothioate
  modified_base 21: mod_base = OTHER; note = 2'O-methyl-nucleotide
  misc_feature 1..6: note = RNA
  misc_feature 7: note = DNA
  misc_feature 8..21: note = RNA
ttggtttgtagactatttgca

SEQ ID NO: 343 - RNA, 23 nt, synthetic construct
  source 1..23: mol_type = other RNA
  modified_base 1: mod_base = OTHER; note = Inverted abasic nucleotide phosphorothioate
  modified_base 2: mod_base = OTHER; note = 2'O-methyl-nucleotide phosphorothioate
  modified_base 3: mod_base = OTHER; note = 2'O-methyl-nucleotide
  modified_base 4: mod_base = OTHER; note = 2'O-methyl-nucleotide
  modified_base 5: mod_base = OTHER; note = 2'O-methyl-nucleotide
  modified_base 6: mod_base = OTHER; note = 2'O-methyl-nucleotide
  modified_base 7: mod_base = OTHER; note = 2'O-methyl-nucleotide
  modified_base 8: mod_base = OTHER; note (2R,3R,4R,5R)-2-(2,4-dioxo-3,4-dihydropyrimidin-1(2H)-yl)-4 -hydroxy-5-(hydroxymethyl)tetrahydrofuran-3-yl hexadecylcarbamate nucleotide
  modified_base 9: mod_base = OTHER; note = 2'O-methyl-nucleotide
  modified_base 10: mod_base = OTHER; note = 2'fluoro-nucleotide
  modified_base 11: mod_base = OTHER; note = 2'fluoro-nucleotide
  modified_base 12: mod_base = OTHER; note = 2'fluoro-nucleotide
  modified_base 13: mod_base = OTHER; note = 2'O-methyl-nucleotide
  modified_base 14: mod_base = OTHER; note = 2'O-methyl-nucleotide
  modified_base 15: mod_base = OTHER; note = 2'O-methyl-nucleotide
  modified_base 16: mod_base = OTHER; note = 2'O-methyl-nucleotide
  modified_base 17: mod_base = OTHER; note = 2'O-methyl-nucleotide
  modified_base 18: mod_base = OTHER; note = 2'O-methyl-nucleotide
  modified_base 19: mod_base = OTHER; note = 2'O-methyl-nucleotide
  modified_base 20: mod_base = OTHER; note = 2'O-methyl-nucleotide
  modified_base 21: mod_base = OTHER; note = 2'O-methyl-nucleotide phosphorothioate
  modified_base 22: mod_base = OTHER; note = 2'O-methyl-nucleotide phosphorothioate
  modified_base 23: mod_base = OTHER; note = Inverted abasic nucleotide
ntgcaaatagtctacaaaccaan

SEQ ID NO: 344 - DNA, 21 bp, synthetic construct
  source 1..21: mol_type = other DNA
  modified_base 1: mod_base = OTHER; note = Vinyl phosphonate 2'O-methyl-nucleotide phosphorothioate
  modified_base 2: mod_base = OTHER; note = 2'fluoro-nucleotide phosphorothioate
  modified_base 3: mod_base = OTHER; note = 2'O-methyl-nucleotide
  modified_base 4: mod_base = OTHER; note = 2'O-methyl-nucleotide
  modified_base 5: mod_base = OTHER; note = 2'O-methyl-nucleotide
  modified_base 6: mod_base = OTHER; note = 2'fluoro-nucleotide
  modified_base 7: mod_base = OTHER; note = 2'O-methyl-nucleotide
  modified_base 8: mod_base = OTHER; note = 2'fluoro-nucleotide
  modified_base 9: mod_base = OTHER; note = 2'fluoro-nucleotide
  modified_base 10: mod_base = OTHER; note = 2'O-methyl-nucleotide
  modified_base 11: mod_base = OTHER; note = 2'O-methyl-nucleotide
  modified_base 12: mod_base = OTHER; note = 2'O-methyl-nucleotide
  modified_base 13: mod_base = OTHER; note = 2'O-methyl-nucleotide
  modified_base 14: mod_base = OTHER; note = 2'fluoro-nucleotide
  modified_base 16: mod_base = OTHER; note = 2'fluoro-nucleotide
  modified_base 17: mod_base = OTHER; note = 2'O-methyl-nucleotide
  modified_base 18: mod_base = OTHER; note = 2'O-methyl-nucleotide
  modified_base 19: mod_base = OTHER; note = 2'O-methyl-nucleotide phosphorothioate
  modified_base 20: mod_base = OTHER; note = 2'O-methyl-nucleotide phosphorothioate
  modified_base 21: mod_base = OTHER; note = 2'O-methyl-nucleotide
  misc_feature 1..14: note = RNA
  misc_feature 15: note = DNA
  misc_feature 16..21: note = RNA
ttggtttgtagactatttgca

SEQ ID NO: 345 - RNA, 23 nt, synthetic construct
  source 1..23: mol_type = other RNA
  modified_base 1: mod_base = OTHER; note = Inverted abasic nucleotide phosphorothioate
  modified_base 2: mod_base = OTHER; note = 2'O-methyl-nucleotide phosphorothioate
  modified_base 3: mod_base = OTHER; note = 2'O-methyl-nucleotide
  modified_base 4: mod_base = OTHER; note = 2'O-methyl-nucleotide
  modified_base 5: mod_base = OTHER; note = 2'O-methyl-nucleotide
  modified_base 6: mod_base = OTHER; note (2R,3R,4R,5R)-2-(2,4-dioxo-3,4-dihydropyrimidin-1(2H)-yl)-4 -hydroxy-5-(hydroxymethyl)tetrahydrofuran-3-yl hexadecylcarbamate nucleotide
  modified_base 7: mod_base = OTHER; note = 2'O-methyl-nucleotide
  modified_base 8: mod_base = OTHER; note = 2'O-methyl-nucleotide
  modified_base 9: mod_base = OTHER; note = 2'O-methyl-nucleotide
  modified_base 10: mod_base = OTHER; note = 2'fluoro-nucleotide
  modified_base 11: mod_base = OTHER; note = 2'fluoro-nucleotide
  modified_base 12: mod_base = OTHER; note = 2'fluoro-nucleotide
  modified_base 13: mod_base = OTHER; note = 2'O-methyl-nucleotide
  modified_base 14: mod_base = OTHER; note = 2'O-methyl-nucleotide
  modified_base 15: mod_base = OTHER; note = 2'O-methyl-nucleotide
  modified_base 16: mod_base = OTHER; note = 2'O-methyl-nucleotide
  modified_base 17: mod_base = OTHER; note = 2'O-methyl-nucleotide
  modified_base 18: mod_base = OTHER; note = 2'O-methyl-nucleotide
  modified_base 19: mod_base = OTHER; note = 2'O-methyl-nucleotide
  modified_base 20: mod_base = OTHER; note = 2'O-methyl-nucleotide
  modified_base 21: mod_base = OTHER; note = 2'O-methyl-nucleotide phosphorothioate
  modified_base 22: mod_base = OTHER; note = 2'O-methyl-nucleotide phosphorothioate
  modified_base 23: mod_base = OTHER; note = Inverted abasic nucleotide
natagtctacaaaccagttgaan

SEQ ID NO: 346 - RNA, 21 nt, synthetic construct
  source 1..21: mol_type = other RNA
  modified_base 1: mod_base = OTHER; note = Vinyl phosphonate 2'O-methyl-nucleotide phosphorothioate
  modified_base 2: mod_base = OTHER; note = 2'fluoro-nucleotide phosphorothioate
  modified_base 3: mod_base = OTHER; note = 2'O-methyl-nucleotide
  modified_base 4: mod_base = OTHER; note = 2'O-methyl-nucleotide
  modified_base 5: mod_base = OTHER; note = 2'O-methyl-nucleotide
  modified_base 6: mod_base = OTHER; note = 2'fluoro-nucleotide
  modified_base 7: mod_base = OTHER; note = 2'O-methyl-nucleotide
  modified_base 8: mod_base = OTHER; note = 2'fluoro-nucleotide
  modified_base 9: mod_base = OTHER; note = 2'fluoro-nucleotide
  modified_base 10: mod_base = OTHER; note = 2'O-methyl-nucleotide
  modified_base 11: mod_base = OTHER; note = 2'O-methyl-nucleotide
  modified_base 12: mod_base = OTHER; note = 2'O-methyl-nucleotide
  modified_base 13: mod_base = OTHER; note = 2'O-methyl-nucleotide
  modified_base 14: mod_base = OTHER; note = 2'fluoro-nucleotide
  modified_base 15: mod_base = OTHER; note = 2'O-methyl-nucleotide
  modified_base 16: mod_base = OTHER; note = 2'fluoro-nucleotide
  modified_base 17: mod_base = OTHER; note = 2'O-methyl-nucleotide
  modified_base 18: mod_base = OTHER; note = 2'O-methyl-nucleotide
  modified_base 19: mod_base = OTHER; note = 2'O-methyl-nucleotide phosphorothioate
  modified_base 20: mod_base = OTHER; note = 2'O-methyl-nucleotide phosphorothioate
  modified_base 21: mod_base = OTHER; note = 2'O-methyl-nucleotide
ttcaactggtttgtagactat

SEQ ID NO: 347 - RNA, 23 nt, synthetic construct
  source 1..23: mol_type = other RNA
  modified_base 1: mod_base = OTHER; note = Inverted abasic nucleotide phosphorothioate
  modified_base 2: mod_base = OTHER; note = 2'O-methyl-nucleotide phosphorothioate
  modified_base 3: mod_base = OTHER; note = 2'O-methyl-nucleotide
  modified_base 4: mod_base = OTHER; note = 2'O-methyl-nucleotide
  modified_base 5: mod_base = OTHER; note = 2'O-methyl-nucleotide
  modified_base 6: mod_base = OTHER; note = 2'O-methyl-nucleotide
  modified_base 7: mod_base = OTHER; note (2R,3R,4R,5R)-2-(4-amino-2-oxopyrimidin-1(2H)-yl)-4-hydroxy -5-(hydroxymethyl)tetrahydrofuran-3-yl hexadecylcarbamate nucleotide
  modified_base 8: mod_base = OTHER; note = 2'O-methyl-nucleotide
  modified_base 9: mod_base = OTHER; note = 2'O-methyl-nucleotide
  modified_base 10: mod_base = OTHER; note = 2'fluoro-nucleotide
  modified_base 11: mod_base = OTHER; note = 2'fluoro-nucleotide
  modified_base 12: mod_base = OTHER; note = 2'fluoro-nucleotide
  modified_base 13: mod_base = OTHER; note = 2'O-methyl-nucleotide
  modified_base 14: mod_base = OTHER; note = 2'O-methyl-nucleotide
  modified_base 15: mod_base = OTHER; note = 2'O-methyl-nucleotide
  modified_base 16: mod_base = OTHER; note = 2'O-methyl-nucleotide
  modified_base 17: mod_base = OTHER; note = 2'O-methyl-nucleotide
  modified_base 18: mod_base = OTHER; note = 2'O-methyl-nucleotide
  modified_base 19: mod_base = OTHER; note = 2'O-methyl-nucleotide
  modified_base 20: mod_base = OTHER; note = 2'O-methyl-nucleotide
  modified_base 21: mod_base = OTHER; note = 2'O-methyl-nucleotide phosphorothioate
  modified_base 22: mod_base = OTHER; note = 2'O-methyl-nucleotide phosphorothioate
  modified_base 23: mod_base = OTHER; note = Inverted abasic nucleotide
natagtctacaaaccagttgaan

SEQ ID NO: 348 - RNA, 21 nt, synthetic construct
  source 1..21: mol_type = other RNA
  modified_base 1: mod_base = OTHER; note = Vinyl phosphonate 2'O-methyl-nucleotide phosphorothioate
  modified_base 2: mod_base = OTHER; note = 2'fluoro-nucleotide phosphorothioate
  modified_base 3: mod_base = OTHER; note = 2'O-methyl-nucleotide
  modified_base 4: mod_base = OTHER; note = 2'O-methyl-nucleotide
  modified_base 5: mod_base = OTHER; note = 2'O-methyl-nucleotide
  modified_base 6: mod_base = OTHER; note = 2'fluoro-nucleotide
  modified_base 7: mod_base = OTHER; note = 2'O-methyl-nucleotide
  modified_base 8: mod_base = OTHER; note = 2'fluoro-nucleotide
  modified_base 9: mod_base = OTHER; note = 2'fluoro-nucleotide
  modified_base 10: mod_base = OTHER; note = 2'O-methyl-nucleotide
  modified_base 11: mod_base = OTHER; note = 2'O-methyl-nucleotide
  modified_base 12: mod_base = OTHER; note = 2'O-methyl-nucleotide
  modified_base 13: mod_base = OTHER; note = 2'O-methyl-nucleotide
  modified_base 14: mod_base = OTHER; note = 2'fluoro-nucleotide
  modified_base 15: mod_base = OTHER; note = 2'O-methyl-nucleotide
  modified_base 16: mod_base = OTHER; note = 2'fluoro-nucleotide
  modified_base 17: mod_base = OTHER; note = 2'O-methyl-nucleotide
  modified_base 18: mod_base = OTHER; note = 2'O-methyl-nucleotide
  modified_base 19: mod_base = OTHER; note = 2'O-methyl-nucleotide phosphorothioate
  modified_base 20: mod_base = OTHER; note = 2'O-methyl-nucleotide phosphorothioate
  modified_base 21: mod_base = OTHER; note = 2'O-methyl-nucleotide
ttcaactggtttgtagactat

SEQ ID NO: 349 - RNA, 23 nt, synthetic construct
  source 1..23: mol_type = other RNA
  modified_base 1: mod_base = OTHER; note = Inverted abasic nucleotide phosphorothioate
  modified_base 2: mod_base = OTHER; note = 2'O-methyl-nucleotide phosphorothioate
  modified_base 3: mod_base = OTHER; note = 2'O-methyl-nucleotide
  modified_base 4: mod_base = OTHER; note = 2'O-methyl-nucleotide
  modified_base 5: mod_base = OTHER; note = 2'O-methyl-nucleotide
  modified_base 6: mod_base = OTHER; note = 2'O-methyl-nucleotide
  modified_base 7: mod_base = OTHER; note = 2'O-methyl-nucleotide
  modified_base 8: mod_base = OTHER; note (2R,3R,4R,5R)-2-(2,4-dioxo-3,4-dihydropyrimidin-1(2H)-yl)-4 -hydroxy-5-(hydroxymethyl)tetrahydrofuran-3-yl hexadecylcarbamate nucleotide
  modified_base 9: mod_base = OTHER; note = 2'O-methyl-nucleotide
  modified_base 10: mod_base = OTHER; note = 2'fluoro-nucleotide
  modified_base 11: mod_base = OTHER; note = 2'fluoro-nucleotide
  modified_base 12: mod_base = OTHER; note = 2'fluoro-nucleotide
  modified_base 13: mod_base = OTHER; note = 2'O-methyl-nucleotide
  modified_base 14: mod_base = OTHER; note = 2'O-methyl-nucleotide
  modified_base 15: mod_base = OTHER; note = 2'O-methyl-nucleotide
  modified_base 16: mod_base = OTHER; note = 2'O-methyl-nucleotide
  modified_base 17: mod_base = OTHER; note = 2'O-methyl-nucleotide
  modified_base 18: mod_base = OTHER; note = 2'O-methyl-nucleotide
  modified_base 19: mod_base = OTHER; note = 2'O-methyl-nucleotide
  modified_base 20: mod_base = OTHER; note = 2'O-methyl-nucleotide
  modified_base 21: mod_base = OTHER; note = 2'O-methyl-nucleotide phosphorothioate
  modified_base 22: mod_base = OTHER; note = 2'O-methyl-nucleotide phosphorothioate
  modified_base 23: mod_base = OTHER; note = Inverted abasic nucleotide
natagtctacaaaccagttgaan

SEQ ID NO: 350 - RNA, 21 nt, synthetic construct
  source 1..21: mol_type = other RNA
  modified_base 1: mod_base = OTHER; note = Vinyl phosphonate 2'O-methyl-nucleotide phosphorothioate
  modified_base 2: mod_base = OTHER; note = 2'fluoro-nucleotide phosphorothioate
  modified_base 3: mod_base = OTHER; note = 2'O-methyl-nucleotide
  modified_base 4: mod_base = OTHER; note = 2'O-methyl-nucleotide
  modified_base 5: mod_base = OTHER; note = 2'O-methyl-nucleotide
  modified_base 6: mod_base = OTHER; note = 2'fluoro-nucleotide
  modified_base 7: mod_base = OTHER; note = 2'O-methyl-nucleotide
  modified_base 8: mod_base = OTHER; note = 2'fluoro-nucleotide
  modified_base 9: mod_base = OTHER; note = 2'fluoro-nucleotide
  modified_base 10: mod_base = OTHER; note = 2'O-methyl-nucleotide
  modified_base 11: mod_base = OTHER; note = 2'O-methyl-nucleotide
  modified_base 12: mod_base = OTHER; note = 2'O-methyl-nucleotide
  modified_base 13: mod_base = OTHER; note = 2'O-methyl-nucleotide
  modified_base 14: mod_base = OTHER; note = 2'fluoro-nucleotide
  modified_base 15: mod_base = OTHER; note = 2'O-methyl-nucleotide
  modified_base 16: mod_base = OTHER; note = 2'fluoro-nucleotide
  modified_base 17: mod_base = OTHER; note = 2'O-methyl-nucleotide
  modified_base 18: mod_base = OTHER; note = 2'O-methyl-nucleotide
  modified_base 19: mod_base = OTHER; note = 2'O-methyl-nucleotide phosphorothioate
  modified_base 20: mod_base = OTHER; note = 2'O-methyl-nucleotide phosphorothioate
  modified_base 21: mod_base = OTHER; note = 2'O-methyl-nucleotide
ttcaactggtttgtagactat

SEQ ID NO: 351 - RNA, 23 nt, synthetic construct
  source 1..23: mol_type = other RNA
  modified_base 1: mod_base = OTHER; note = Inverted abasic nucleotide phosphorothioate
  modified_base 2: mod_base = OTHER; note = 2'O-methyl-nucleotide phosphorothioate
  modified_base 3: mod_base = OTHER; note = 2'O-methyl-nucleotide
  modified_base 4: mod_base = OTHER; note = 2'O-methyl-nucleotide
  modified_base 5: mod_base = OTHER; note = 2'O-methyl-nucleotide
  modified_base 6: mod_base = OTHER; note = 2'O-methyl-nucleotide
  modified_base 7: mod_base = OTHER; note = 2'O-methyl-nucleotide
  modified_base 8: mod_base = OTHER; note = 2'O-methyl-nucleotide
  modified_base 9: mod_base = OTHER; note = 2'O-methyl-nucleotide
  modified_base 10: mod_base = OTHER; note = 2'fluoro-nucleotide
  modified_base 11: mod_base = OTHER; note = 2'fluoro-nucleotide
  modified_base 12: mod_base = OTHER; note = 2'fluoro-nucleotide
  modified_base 13: mod_base = OTHER; note = 2'O-methyl-nucleotide
  modified_base 14: mod_base = OTHER; note (2R,3R,4R,5R)-2-(4-amino-2-oxopyrimidin-1(2H)-yl)-4-hydroxy -5-(hydroxymethyl)tetrahydrofuran-3-yl hexadecylcarbamate nucleotide
  modified_base 15: mod_base = OTHER; note = 2'O-methyl-nucleotide
  modified_base 16: mod_base = OTHER; note = 2'O-methyl-nucleotide
  modified_base 17: mod_base = OTHER; note = 2'O-methyl-nucleotide
  modified_base 18: mod_base = OTHER; note = 2'O-methyl-nucleotide
  modified_base 19: mod_base = OTHER; note = 2'O-methyl-nucleotide
  modified_base 20: mod_base = OTHER; note = 2'O-methyl-nucleotide
  modified_base 21: mod_base = OTHER; note = 2'O-methyl-nucleotide phosphorothioate
  modified_base 22: mod_base = OTHER; note = 2'O-methyl-nucleotide phosphorothioate
  modified_base 23: mod_base = OTHER; note = Inverted abasic nucleotide
natagtctacaaaccagttgaan

SEQ ID NO: 352 - RNA, 21 nt, synthetic construct
  source 1..21: mol_type = other RNA
  modified_base 1: mod_base = OTHER; note = Vinyl phosphonate 2'O-methyl-nucleotide phosphorothioate
  modified_base 2: mod_base = OTHER; note = 2'fluoro-nucleotide phosphorothioate
  modified_base 3: mod_base = OTHER; note = 2'O-methyl-nucleotide
  modified_base 4: mod_base = OTHER; note = 2'O-methyl-nucleotide
  modified_base 5: mod_base = OTHER; note = 2'O-methyl-nucleotide
  modified_base 6: mod_base = OTHER; note = 2'fluoro-nucleotide
  modified_base 7: mod_base = OTHER; note = 2'O-methyl-nucleotide
  modified_base 8: mod_base = OTHER; note = 2'fluoro-nucleotide
  modified_base 9: mod_base = OTHER; note = 2'fluoro-nucleotide
  modified_base 10: mod_base = OTHER; note = 2'O-methyl-nucleotide
  modified_base 11: mod_base = OTHER; note = 2'O-methyl-nucleotide
  modified_base 12: mod_base = OTHER; note = 2'O-methyl-nucleotide
  modified_base 13: mod_base = OTHER; note = 2'O-methyl-nucleotide
  modified_base 14: mod_base = OTHER; note = 2'fluoro-nucleotide
  modified_base 15: mod_base = OTHER; note = 2'O-methyl-nucleotide
  modified_base 16: mod_base = OTHER; note = 2'fluoro-nucleotide
  modified_base 17: mod_base = OTHER; note = 2'O-methyl-nucleotide
  modified_base 18: mod_base = OTHER; note = 2'O-methyl-nucleotide
  modified_base 19: mod_base = OTHER; note = 2'O-methyl-nucleotide phosphorothioate
  modified_base 20: mod_base = OTHER; note = 2'O-methyl-nucleotide phosphorothioate
  modified_base 21: mod_base = OTHER; note = 2'O-methyl-nucleotide
ttcaactggtttgtagactat

SEQ ID NO: 353 - RNA, 23 nt, synthetic construct
  source 1..23: mol_type = other RNA
  modified_base 1: mod_base = OTHER; note = Inverted abasic nucleotide phosphorothioate
  modified_base 2: mod_base = OTHER; note = 2'O-methyl-nucleotide phosphorothioate
  modified_base 3: mod_base = OTHER; note = 2'O-methyl-nucleotide
  modified_base 4: mod_base = OTHER; note = 2'O-methyl-nucleotide
  modified_base 5: mod_base = OTHER; note = 2'O-methyl-nucleotide
  modified_base 6: mod_base = OTHER; note = 2'O-methyl-nucleotide
  modified_base 7: mod_base = OTHER; note = 2'O-methyl-nucleotide
  modified_base 8: mod_base = OTHER; note = 2'O-methyl-nucleotide
  modified_base 9: mod_base = OTHER; note = 2'O-methyl-nucleotide
  modified_base 10: mod_base = OTHER; note = 2'fluoro-nucleotide
  modified_base 11: mod_base = OTHER; note = 2'fluoro-nucleotide
  modified_base 12: mod_base = OTHER; note = 2'fluoro-nucleotide
  modified_base 13: mod_base = OTHER; note = 2'O-methyl-nucleotide
  modified_base 14: mod_base = OTHER; note = 2'O-methyl-nucleotide
  modified_base 15: mod_base = OTHER; note (2R,3R,4R,5R)-2-(4-amino-2-oxopyrimidin-1(2H)-yl)-4-hydroxy -5-(hydroxymethyl)tetrahydrofuran-3-yl hexadecylcarbamate nucleotide
  modified_base 16: mod_base = OTHER; note = 2'O-methyl-nucleotide
  modified_base 17: mod_base = OTHER; note = 2'O-methyl-nucleotide
  modified_base 18: mod_base = OTHER; note = 2'O-methyl-nucleotide
  modified_base 19: mod_base = OTHER; note = 2'O-methyl-nucleotide
  modified_base 20: mod_base = OTHER; note = 2'O-methyl-nucleotide
  modified_base 21: mod_base = OTHER; note = 2'O-methyl-nucleotide phosphorothioate
  modified_base 22: mod_base = OTHER; note = 2'O-methyl-nucleotide phosphorothioate
  modified_base 23: mod_base = OTHER; note = Inverted abasic nucleotide
natagtctacaaaccagttgaan

SEQ ID NO: 354 - RNA, 21 nt, synthetic construct
  source 1..21: mol_type = other RNA
  modified_base 1: mod_base = OTHER; note = Vinyl phosphonate 2'O-methyl-nucleotide phosphorothioate
  modified_base 2: mod_base = OTHER; note = 2'fluoro-nucleotide phosphorothioate
  modified_base 3: mod_base = OTHER; note = 2'O-methyl-nucleotide
  modified_base 4: mod_base = OTHER; note = 2'O-methyl-nucleotide
  modified_base 5: mod_base = OTHER; note = 2'O-methyl-nucleotide
  modified_base 6: mod_base = OTHER; note = 2'fluoro-nucleotide
  modified_base 7: mod_base = OTHER; note = 2'O-methyl-nucleotide
  modified_base 8: mod_base = OTHER; note = 2'fluoro-nucleotide
  modified_base 9: mod_base = OTHER; note = 2'fluoro-nucleotide
  modified_base 10: mod_base = OTHER; note = 2'O-methyl-nucleotide
  modified_base 11: mod_base = OTHER; note = 2'O-methyl-nucleotide
  modified_base 12: mod_base = OTHER; note = 2'O-methyl-nucleotide
  modified_base 13: mod_base = OTHER; note = 2'O-methyl-nucleotide
  modified_base 14: mod_base = OTHER; note = 2'fluoro-nucleotide
  modified_base 15: mod_base = OTHER; note = 2'O-methyl-nucleotide
  modified_base 16: mod_base = OTHER; note = 2'fluoro-nucleotide
  modified_base 17: mod_base = OTHER; note = 2'O-methyl-nucleotide
  modified_base 18: mod_base = OTHER; note = 2'O-methyl-nucleotide
  modified_base 19: mod_base = OTHER; note = 2'O-methyl-nucleotide phosphorothioate
  modified_base 20: mod_base = OTHER; note = 2'O-methyl-nucleotide phosphorothioate
  modified_base 21: mod_base = OTHER; note = 2'O-methyl-nucleotide
ttcaactggtttgtagactat

SEQ ID NO: 355 - RNA, 23 nt, synthetic construct
  source 1..23: mol_type = other RNA
  modified_base 1: mod_base = OTHER; note = Inverted abasic nucleotide phosphorothioate
  modified_base 2: mod_base = OTHER; note = 2'O-methyl-nucleotide phosphorothioate
  modified_base 3: mod_base = OTHER; note = 2'O-methyl-nucleotide
  modified_base 4: mod_base = OTHER; note = 2'O-methyl-nucleotide
  modified_base 5: mod_base = OTHER; note = 2'O-methyl-nucleotide
  modified_base 6: mod_base = OTHER; note = 2'O-methyl-nucleotide
  modified_base 7: mod_base = OTHER; note = 2'O-methyl-nucleotide
  modified_base 8: mod_base = OTHER; note = 2'O-methyl-nucleotide
  modified_base 9: mod_base = OTHER; note = 2'O-methyl-nucleotide
  modified_base 10: mod_base = OTHER; note = 2'fluoro-nucleotide
  modified_base 11: mod_base = OTHER; note = 2'fluoro-nucleotide
  modified_base 12: mod_base = OTHER; note = 2'fluoro-nucleotide
  modified_base 13: mod_base = OTHER; note = 2'O-methyl-nucleotide
  modified_base 14: mod_base = OTHER; note = 2'O-methyl-nucleotide
  modified_base 15: mod_base = OTHER; note = 2'O-methyl-nucleotide
  modified_base 16: mod_base = OTHER; note = 2'O-methyl-nucleotide
  modified_base 17: mod_base = OTHER; note (2R,3R,4R,5R)-2-(2-amino-6-oxo-1,6-dihydro-9H-purin-9-yl)-4 -hydroxy-5-(hydroxymethyl)tetrahydrofuran-3-yl hexadecylcarbamate nucleotide
  modified_base 18: mod_base = OTHER; note = 2'O-methyl-nucleotide
  modified_base 19: mod_base = OTHER; note = 2'O-methyl-nucleotide
  modified_base 20: mod_base = OTHER; note = 2'O-methyl-nucleotide
  modified_base 21: mod_base = OTHER; note = 2'O-methyl-nucleotide phosphorothioate
  modified_base 22: mod_base = OTHER; note = 2'O-methyl-nucleotide phosphorothioate
  modified_base 23: mod_base = OTHER; note = Inverted abasic nucleotide
natagtctacaaaccagttgaan

SEQ ID NO: 356 - RNA, 21 nt, synthetic construct
  source 1..21: mol_type = other RNA
  modified_base 1: mod_base = OTHER; note = Vinyl phosphonate 2'O-methyl-nucleotide phosphorothioate
  modified_base 2: mod_base = OTHER; note = 2'fluoro-nucleotide phosphorothioate
  modified_base 3: mod_base = OTHER; note = 2'O-methyl-nucleotide
  modified_base 4: mod_base = OTHER; note = 2'O-methyl-nucleotide
  modified_base 5: mod_base = OTHER; note = 2'O-methyl-nucleotide
  modified_base 6: mod_base = OTHER; note = 2'fluoro-nucleotide
  modified_base 7: mod_base = OTHER; note = 2'O-methyl-nucleotide
  modified_base 8: mod_base = OTHER; note = 2'fluoro-nucleotide
  modified_base 9: mod_base = OTHER; note = 2'fluoro-nucleotide
  modified_base 10: mod_base = OTHER; note = 2'O-methyl-nucleotide
  modified_base 11: mod_base = OTHER; note = 2'O-methyl-nucleotide
  modified_base 12: mod_base = OTHER; note = 2'O-methyl-nucleotide
  modified_base 13: mod_base = OTHER; note = 2'O-methyl-nucleotide
  modified_base 14: mod_base = OTHER; note = 2'fluoro-nucleotide
  modified_base 15: mod_base = OTHER; note = 2'O-methyl-nucleotide
  modified_base 16: mod_base = OTHER; note = 2'fluoro-nucleotide
  modified_base 17: mod_base = OTHER; note = 2'O-methyl-nucleotide
  modified_base 18: mod_base = OTHER; note = 2'O-methyl-nucleotide
  modified_base 19: mod_base = OTHER; note = 2'O-methyl-nucleotide phosphorothioate
  modified_base 20: mod_base = OTHER; note = 2'O-methyl-nucleotide phosphorothioate
  modified_base 21: mod_base = OTHER; note = 2'O-methyl-nucleotide
ttcaactggtttgtagactat

SEQ ID NO: 357 - RNA, 21 nt, synthetic construct
  source 1..21: mol_type = other RNA
  modified_base 1: mod_base = OTHER; note = 2'O-methyl-nucleotide phosphorothioate
  modified_base 2: mod_base = OTHER; note = 2'O-methyl-nucleotide phosphorothioate
  modified_base 3: mod_base = OTHER; note = 2'fluoro-nucleotide
  modified_base 4: mod_base = OTHER; note = 2'O-methyl-nucleotide
  modified_base 5: mod_base = OTHER; note = 2'fluoro-nucleotide
  modified_base 6: mod_base = OTHER; note = 2'O-methyl-nucleotide
  modified_base 7: mod_base = OTHER; note = 2'fluoro-nucleotide
  modified_base 8: mod_base = OTHER; note = 2'O-methyl-nucleotide
  modified_base 9: mod_base = OTHER; note = 2'fluoro-nucleotide
  modified_base 10: mod_base = OTHER; note = 2'O-methyl-nucleotide
  modified_base 11: mod_base = OTHER; note = 2'fluoro-nucleotide
  modified_base 12: mod_base = OTHER; note = 2'O-methyl-nucleotide
  modified_base 13: mod_base = OTHER; note = 2'fluoro-nucleotide
  modified_base 14: mod_base = OTHER; note = 2'O-methyl-nucleotide
  modified_base 15: mod_base = OTHER; note = 2'fluoro-nucleotide
  modified_base 16: mod_base = OTHER; note = 2'O-methyl-nucleotide
  modified_base 17: mod_base = OTHER; note = 2'fluoro-nucleotide
  modified_base 18: mod_base = OTHER; note = 2'O-methyl-nucleotide
  modified_base 19: mod_base = OTHER; note = 2'fluoro-nucleotide phosphorothioate
  modified_base 20: mod_base = OTHER; note = 2'O-methyl-nucleotide phosphorothioate
  modified_base 21: mod_base = OTHER; note = 2'O-methyl-nucleotide
agtctacaaaccagttgaatt

SEQ ID NO: 358 - RNA, 21 nt, synthetic construct
  source 1..21: mol_type = other RNA
  modified_base 1: mod_base = OTHER; note = Vinyl phosphonate 2'O-methyl-nucleotide phosphorothioate
  modified_base 2: mod_base = OTHER; note = 2'fluoro-nucleotide phosphorothioate
  modified_base 3: mod_base = OTHER; note = 2'O-methyl-nucleotide
  modified_base 4: mod_base = OTHER; note = 2'fluoro-nucleotide
  modified_base 5: mod_base = OTHER; note = 2'O-methyl-nucleotide
  modified_base 6: mod_base = OTHER; note = 2'fluoro-nucleotide
  modified_base 7: mod_base = OTHER; note = 2'O-methyl-nucleotide
  modified_base 8: mod_base = OTHER; note = 2'fluoro-nucleotide
  modified_base 9: mod_base = OTHER; note = 2'O-methyl-nucleotide
  modified_base 10: mod_base = OTHER; note = 2'fluoro-nucleotide
  modified_base 11: mod_base = OTHER; note = 2'O-methyl-nucleotide
  modified_base 12: mod_base = OTHER; note = 2'fluoro-nucleotide
  modified_base 13: mod_base = OTHER; note = 2'O-methyl-nucleotide
  modified_base 14: mod_base = OTHER; note = 2'fluoro-nucleotide
  modified_base 15: mod_base = OTHER; note = 2'O-methyl-nucleotide
  modified_base 16: mod_base = OTHER; note = 2'fluoro-nucleotide
  modified_base 17: mod_base = OTHER; note = 2'O-methyl-nucleotide
  modified_base 18: mod_base = OTHER; note = 2'fluoro-nucleotide
  modified_base 19: mod_base = OTHER; note = 2'O-methyl-nucleotide phosphorothioate
  modified_base 20: mod_base = OTHER; note = 2'O-methyl-nucleotide phosphorothioate
  modified_base 21: mod_base = OTHER; note = 2'O-methyl-nucleotide
ttcaactggtttgtagacttt

SEQ ID NO: 359 - RNA, 19 nt, synthetic construct
  source 1..19: mol_type = other RNA
  modified_base 1: mod_base = OTHER; note = 2'O-methyl-nucleotide phosphorothioate
  modified_base 2: mod_base = OTHER; note = 2'O-methyl-nucleotide phosphorothioate
  modified_base 3: mod_base = OTHER; note = 2'fluoro-nucleotide
  modified_base 4: mod_base = OTHER; note = 2'O-methyl-nucleotide
  modified_base 5: mod_base = OTHER; note = 2'O-methyl-nucleotide
  modified_base 6: mod_base = OTHER; note = 2'O-methyl-nucleotide
  modified_base 7: mod_base = OTHER; note = 2'fluoro-nucleotide
  modified_base 8: mod_base = OTHER; note = 2'fluoro-nucleotide
  modified_base 9: mod_base = OTHER; note = 2'fluoro-nucleotide
  modified_base 10: mod_base = OTHER; note = 2'O-methyl-nucleotide
  modified_base 11: mod_base = OTHER; note = 2'O-methyl-nucleotide
  modified_base 12: mod_base = OTHER; note = 2'fluoro-nucleotide
  modified_base 13: mod_base = OTHER; note = 2'O-methyl-nucleotide
  modified_base 14: mod_base = OTHER; note = 2'O-methyl-nucleotide
  modified_base 15: mod_base = OTHER; note = 2'O-methyl-nucleotide
  modified_base 16: mod_base = OTHER; note = 2'O-methyl-nucleotide
  modified_base 17: mod_base = OTHER; note = 2'fluoro-nucleotide
  modified_base 18: mod_base = OTHER; note = 2'O-methyl-nucleotide
  modified_base 19: mod_base = OTHER; note = 2'O-methyl-nucleotide
agtctacaaaccagttgaa

SEQ ID NO: 360 - RNA, 21 nt, synthetic construct
  source 1..21: mol_type = other RNA
  modified_base 1: mod_base = OTHER; note = Vinyl phosphonate 2'O-methyl-nucleotide phosphorothioate
  modified_base 2: mod_base = OTHER; note = 2'fluoro-nucleotide phosphorothioate
  modified_base 3: mod_base = OTHER; note = 2'O-methyl-nucleotide
  modified_base 4: mod_base = OTHER; note = 2'O-methyl-nucleotide
  modified_base 5: mod_base = OTHER; note = 2'O-methyl-nucleotide
  modified_base 6: mod_base = OTHER; note = 2'fluoro-nucleotide
  modified_base 7: mod_base = OTHER; note = 2'O-methyl-nucleotide
  modified_base 8: mod_base = OTHER; note = 2'O-methyl-nucleotide
  modified_base 9: mod_base = OTHER; note = 2'O-methyl-nucleotide
  modified_base 10: mod_base = OTHER; note = 2'O-methyl-nucleotide
  modified_base 11: mod_base = OTHER; note = 2'O-methyl-nucleotide
  modified_base 12: mod_base = OTHER; note = 2'O-methyl-nucleotide
  modified_base 13: mod_base = OTHER; note = 2'O-methyl-nucleotide
  modified_base 14: mod_base = OTHER; note = 2'fluoro-nucleotide
  modified_base 15: mod_base = OTHER; note = 2'O-methyl-nucleotide
  modified_base 16: mod_base = OTHER; note = 2'fluoro-nucleotide
  modified_base 17: mod_base = OTHER; note = 2'O-methyl-nucleotide
  modified_base 18: mod_base = OTHER; note = 2'O-methyl-nucleotide
  modified_base 19: mod_base = OTHER; note = 2'O-methyl-nucleotide phosphorothioate
  modified_base 20: mod_base = OTHER; note = 2'O-methyl-nucleotide phosphorothioate
  modified_base 21: mod_base = OTHER; note = 2'O-methyl-nucleotide
ttcaactggtttgtagactat

SEQ ID NO: 361 - RNA, 21 nt, synthetic construct
  source 1..21: mol_type = other RNA
  modified_base 1: mod_base = OTHER; note = Inverted abasic nucleotide phosphorothioate
  modified_base 2: mod_base = OTHER; note = 2'O-methyl-nucleotide phosphorothioate
  modified_base 3: mod_base = OTHER; note = 2'O-methyl-nucleotide
  modified_base 4: mod_base = OTHER; note = 2'O-methyl-nucleotide
  modified_base 5: mod_base = OTHER; note = 2'O-methyl-nucleotide
  modified_base 6: mod_base = OTHER; note = 2'O-methyl-nucleotide
  modified_base 7: mod_base = OTHER; note = 2'O-methyl-nucleotide
  modified_base 8: mod_base = OTHER; note = 2'fluoro-nucleotide
  modified_base 9: mod_base = OTHER; note = 2'fluoro-nucleotide
  modified_base 10: mod_base = OTHER; note = 2'fluoro-nucleotide
  modified_base 11: mod_base = OTHER; note = 2'O-methyl-nucleotide
  modified_base 12: mod_base = OTHER; note = 2'O-methyl-nucleotide
  modified_base 13: mod_base = OTHER; note = 2'O-methyl-nucleotide
  modified_base 14: mod_base = OTHER; note = 2'O-methyl-nucleotide
  modified_base 15: mod_base = OTHER; note = 2'O-methyl-nucleotide
  modified_base 16: mod_base = OTHER; note = 2'O-methyl-nucleotide
  modified_base 17: mod_base = OTHER; note = 2'O-methyl-nucleotide
  modified_base 18: mod_base = OTHER; note = 2'O-methyl-nucleotide
  modified_base 19: mod_base = OTHER; note = 2'O-methyl-nucleotide phosphorothioate
  modified_base 20: mod_base = OTHER; note = 2'O-methyl-nucleotide phosphorothioate
  modified_base 21: mod_base = OTHER; note = Inverted abasic nucleotide
nagtctacaaaccagttgaan

SEQ ID NO: 362 - RNA, 21 nt, synthetic construct
  source 1..21: mol_type = other RNA
  modified_base 1: mod_base = OTHER; note = Vinyl phosphonate 2'O-methyl-nucleotide phosphorothioate
  modified_base 2: mod_base = OTHER; note = 2'fluoro-nucleotide phosphorothioate
  modified_base 3: mod_base = OTHER; note = 2'O-methyl-nucleotide phosphorothioate
  modified_base 4: mod_base = OTHER; note = 2'fluoro-nucleotide
  modified_base 5: mod_base = OTHER; note = 2'O-methyl-nucleotide
  modified_base 6: mod_base = OTHER; note = 2'fluoro-nucleotide
  modified_base 7: mod_base = OTHER; note = 2'O-methyl-nucleotide
  modified_base 8: mod_base = OTHER; note = 2'fluoro-nucleotide
  modified_base 9: mod_base = OTHER; note = 2'O-methyl-nucleotide
  modified_base 10: mod_base = OTHER; note = 2'fluoro-nucleotide
  modified_base 11: mod_base = OTHER; note = 2'O-methyl-nucleotide
  modified_base 12: mod_base = OTHER; note = 2'fluoro-nucleotide
  modified_base 13: mod_base = OTHER; note = 2'O-methyl-nucleotide
  modified_base 14: mod_base = OTHER; note = 2'fluoro-nucleotide
  modified_base 15: mod_base = OTHER; note = 2'O-methyl-nucleotide
  modified_base 16: mod_base = OTHER; note = 2'fluoro-nucleotide
  modified_base 17: mod_base = OTHER; note = 2'O-methyl-nucleotide
  modified_base 18: mod_base = OTHER; note = 2'fluoro-nucleotide
  modified_base 19: mod_base = OTHER; note = 2'O-methyl-nucleotide
  modified_base 20: mod_base = OTHER; note = 2'O-methyl-nucleotide phosphorothioate
  modified_base 21: mod_base = OTHER; note = 2'O-methyl-nucleotide
ttcaactggtttgtagactat

SEQ ID NO: 363 - RNA, 19 nt, synthetic construct
  source 1..19: mol_type = other RNA
  modified_base 1: mod_base = OTHER; note = 2'O-methyl-nucleotide phosphorothioate
  modified_base 2: mod_base = OTHER; note = 2'O-methyl-nucleotide phosphorothioate
  modified_base 3: mod_base = OTHER; note = 2'O-methyl-nucleotide
  modified_base 4: mod_base = OTHER; note = 2'O-methyl-nucleotide
  modified_base 5: mod_base = OTHER; note = 2'fluoro-nucleotide
  modified_base 6: mod_base = OTHER; note = 2'O-methyl-nucleotide
  modified_base 7: mod_base = OTHER; note = 2'fluoro-nucleotide
  modified_base 8: mod_base = OTHER; note = 2'fluoro-nucleotide
  modified_base 9: mod_base = OTHER; note = 2'fluoro-nucleotide
  modified_base 10: mod_base = OTHER; note = 2'O-methyl-nucleotide
  modified_base 11: mod_base = OTHER; note = 2'O-methyl-nucleotide
  modified_base 12: mod_base = OTHER; note = 2'O-methyl-nucleotide
  modified_base 13: mod_base = OTHER; note = 2'O-methyl-nucleotide
  modified_base 14: mod_base = OTHER; note = 2'O-methyl-nucleotide
  modified_base 15: mod_base = OTHER; note = 2'O-methyl-nucleotide
  modified_base 16: mod_base = OTHER; note = 2'O-methyl-nucleotide
  modified_base 17: mod_base = OTHER; note = 2'O-methyl-nucleotide phosphorothioate
  modified_base 18: mod_base = OTHER; note = 2'O-methyl-nucleotide phosphorothioate
  modified_base 19: mod_base = OTHER; note = 2'O-methyl-nucleotide
agtctacaaaccagttgaa

SEQ ID NO: 364 - RNA, 21 nt, synthetic construct
  source 1..21: mol_type = other RNA
  modified_base 1: mod_base = OTHER; note = Vinyl phosphonate 2'O-methyl-nucleotide phosphorothioate
  modified_base 2: mod_base = OTHER; note = 2'fluoro-nucleotide phosphorothioate
  modified_base 3: mod_base = OTHER; note = 2'O-methyl-nucleotide phosphorothioate
  modified_base 4: mod_base = OTHER; note = 2'O-methyl-nucleotide
  modified_base 5: mod_base = OTHER; note = 2'O-methyl-nucleotide
  modified_base 6: mod_base = OTHER; note = 2'fluoro-nucleotide
  modified_base 7: mod_base = OTHER; note = 2'O-methyl-nucleotide
  modified_base 8: mod_base = OTHER; note = 2'fluoro-nucleotide
  modified_base 9: mod_base = OTHER; note = 2'fluoro-nucleotide
  modified_base 10: mod_base = OTHER; note = 2'O-methyl-nucleotide
  modified_base 11: mod_base = OTHER; note = 2'O-methyl-nucleotide
  modified_base 12: mod_base = OTHER; note = 2'O-methyl-nucleotide
  modified_base 13: mod_base = OTHER; note = 2'O-methyl-nucleotide
  modified_base 14: mod_base = OTHER; note = 2'fluoro-nucleotide
  modified_base 15: mod_base = OTHER; note = 2'O-methyl-nucleotide
  modified_base 16: mod_base = OTHER; note = 2'fluoro-nucleotide
  modified_base 17: mod_base = OTHER; note = 2'O-methyl-nucleotide
  modified_base 18: mod_base = OTHER; note = 2'O-methyl-nucleotide
  modified_base 19: mod_base = OTHER; note = 2'O-methyl-nucleotide phosphorothioate
  modified_base 20: mod_base = OTHER; note = 2'O-methyl-nucleotide phosphorothioate
  modified_base 21: mod_base = OTHER; note = 2'O-methyl-nucleotide
ttcaactggtttgtagactat

SEQ ID NO: 365 - RNA, 21 nt, synthetic construct
  source 1..21: mol_type = other RNA
  modified_base 1: mod_base = OTHER; note = 2'O-methyl-nucleotide phosphorothioate
  modified_base 2: mod_base = OTHER; note = 2'O-methyl-nucleotide phosphorothioate
  modified_base 3: mod_base = OTHER; note = 2'O-methyl-nucleotide
  modified_base 4: mod_base = OTHER; note = 2'O-methyl-nucleotide
  modified_base 5: mod_base = OTHER; note = 2'O-methyl-nucleotide
  modified_base 6: mod_base = OTHER; note = 2'O-methyl-nucleotide
  modified_base 7: mod_base = OTHER; note = 2'fluoro-nucleotide
  modified_base 8: mod_base = OTHER; note = 2'O-methyl-nucleotide
  modified_base 9: mod_base = OTHER; note = 2'fluoro-nucleotide
  modified_base 10: mod_base = OTHER; note = 2'fluoro-nucleotide
  modified_base 11: mod_base = OTHER; note = 2'fluoro-nucleotide
  modified_base 12: mod_base = OTHER; note = 2'O-methyl-nucleotide
  modified_base 13: mod_base = OTHER; note = 2'O-methyl-nucleotide
  modified_base 14: mod_base = OTHER; note = 2'O-methyl-nucleotide
  modified_base 15: mod_base = OTHER; note = 2'O-methyl-nucleotide
  modified_base 16: mod_base = OTHER; note = 2'O-methyl-nucleotide
  modified_base 17: mod_base = OTHER; note = 2'O-methyl-nucleotide
  modified_base 18: mod_base = OTHER; note = 2'O-methyl-nucleotide
  modified_base 19: mod_base = OTHER; note = 2'O-methyl-nucleotide phosphorothioate
  modified_base 20: mod_base = OTHER; note = 2'O-methyl-nucleotide phosphorothioate
  modified_base 21: mod_base = OTHER; note = 2'O-methyl-nucleotide
atagtctacaaaccagttgaa

SEQ ID NO: 366 - RNA, 23 nt, synthetic construct
  source 1..23: mol_type = other RNA
  modified_base 1: mod_base = OTHER; note = Vinyl phosphonate 2'O-methyl-nucleotide phosphorothioate
  modified_base 2: mod_base = OTHER; note = 2'fluoro-nucleotide phosphorothioate
  modified_base 3: mod_base = OTHER; note = 2'O-methyl-nucleotide
  modified_base 4: mod_base = OTHER; note = 2'O-methyl-nucleotide
  modified_base 5: mod_base = OTHER; note = 2'O-methyl-nucleotide
  modified_base 6: mod_base = OTHER; note = 2'fluoro-nucleotide
  modified_base 7: mod_base = OTHER; note = 2'O-methyl-nucleotide
  modified_base 8: mod_base = OTHER; note = 2'fluoro-nucleotide
  modified_base 9: mod_base = OTHER; note = 2'fluoro-nucleotide
  modified_base 10: mod_base = OTHER; note = 2'O-methyl-nucleotide
  modified_base 11: mod_base = OTHER; note = 2'O-methyl-nucleotide
  modified_base 12: mod_base = OTHER; note = 2'O-methyl-nucleotide
  modified_base 13: mod_base = OTHER; note = 2'O-methyl-nucleotide
  modified_base 14: mod_base = OTHER; note = 2'fluoro-nucleotide
  modified_base 15: mod_base = OTHER; note = 2'O-methyl-nucleotide
  modified_base 16: mod_base = OTHER; note = 2'fluoro-nucleotide
  modified_base 17: mod_base = OTHER; note = 2'O-methyl-nucleotide
  modified_base 18: mod_base = OTHER; note = 2'O-methyl-nucleotide
  modified_base 19: mod_base = OTHER; note = 2'O-methyl-nucleotide
  modified_base 20: mod_base = OTHER; note = 2'O-methyl-nucleotide
  modified_base 21: mod_base = OTHER; note = 2'O-methyl-nucleotide phosphorothioate
  modified_base 22: mod_base = OTHER; note = 2'O-methyl-nucleotide phosphorothioate
  modified_base 23: mod_base = OTHER; note = 2'O-methyl-nucleotide
ttcaactggtttgtagactattt

SEQ ID NO: 367 - RNA, 21 nt, synthetic construct
  source 1..21: mol_type = other RNA
  modified_base 1: mod_base = OTHER; note = 2'O-methyl-nucleotide phosphorothioate
  modified_base 2: mod_base = OTHER; note = 2'O-methyl-nucleotide phosphorothioate
  modified_base 3: mod_base = OTHER; note = 2'O-methyl-nucleotide
  modified_base 4: mod_base = OTHER; note = 2'O-methyl-nucleotide
  modified_base 5: mod_base = OTHER; note = 2'O-methyl-nucleotide
  modified_base 6: mod_base = OTHER; note = 2'O-methyl-nucleotide
  modified_base 7: mod_base = OTHER; note = 2'O-methyl-nucleotide
  modified_base 8: mod_base = OTHER; note = 2'O-methyl-nucleotide
  modified_base 9: mod_base = OTHER; note = 2'fluoro-nucleotide
  modified_base 10: mod_base = OTHER; note = 2'O-methyl-nucleotide
  modified_base 11: mod_base = OTHER; note = 2'fluoro-nucleotide
  modified_base 12: mod_base = OTHER; note = 2'fluoro-nucleotide
  modified_base 13: mod_base = OTHER; note = 2'fluoro-nucleotide
  modified_base 14: mod_base = OTHER; note = 2'fluoro-nucleotide
  modified_base 15: mod_base = OTHER; note = 2'O-methyl-nucleotide
  modified_base 16: mod_base = OTHER; note = 2'O-methyl-nucleotide
  modified_base 17: mod_base = OTHER; note = 2'O-methyl-nucleotide
  modified_base 18: mod_base = OTHER; note = 2'O-methyl-nucleotide
  modified_base 19: mod_base = OTHER; note = 2'O-methyl-nucleotide
  modified_base 20: mod_base = OTHER; note = 2'O-methyl-nucleotide phosphorothioate
  modified_base 21: mod_base = OTHER; note = Inverted abasic nucleotide
tagtctacaaaccagttgaan

SEQ ID NO: 368 - RNA, 23 nt, synthetic construct
  source 1..23: mol_type = other RNA
  modified_base 1: mod_base = OTHER; note = Vinyl phosphonate 2'O-methyl-nucleotide phosphorothioate
  modified_base 2: mod_base = OTHER; note = 2'fluoro-nucleotide phosphorothioate
  modified_base 3: mod_base = OTHER; note = 2'O-methyl-nucleotide
  modified_base 4: mod_base = OTHER; note = 2'O-methyl-nucleotide
  modified_base 5: mod_base = OTHER; note = 2'O-methyl-nucleotide
  modified_base 6: mod_base = OTHER; note = 2'O-methyl-nucleotide
  modified_base 7: mod_base = OTHER; note = 2'fluoro-nucleotide
  modified_base 8: mod_base = OTHER; note = 2'O-methyl-nucleotide
  modified_base 9: mod_base = OTHER; note = 2'O-methyl-nucleotide
  modified_base 10: mod_base = OTHER; note = 2'O-methyl-nucleotide
  modified_base 11: mod_base = OTHER; note = 2'O-methyl-nucleotide
  modified_base 12: mod_base = OTHER; note = 2'fluoro-nucleotide
  modified_base 13: mod_base = OTHER; note = 2'O-methyl-nucleotide
  modified_base 14: mod_base = OTHER; note = 2'fluoro-nucleotide
  modified_base 15: mod_base = OTHER; note = 2'O-methyl-nucleotide
  modified_base 16: mod_base = OTHER; note = 2'O-methyl-nucleotide
  modified_base 17: mod_base = OTHER; note = 2'O-methyl-nucleotide
  modified_base 18: mod_base = OTHER; note = 2'O-methyl-nucleotide
  modified_base 19: mod_base = OTHER; note = 2'O-methyl-nucleotide
  modified_base 20: mod_base = OTHER; note = 2'O-methyl-nucleotide
  modified_base 21: mod_base = OTHER; note = 2'O-methyl-nucleotide phosphorothioate
  modified_base 22: mod_base = OTHER; note = 2'O-methyl-nucleotide phosphorothioate
  modified_base 23: mod_base = OTHER; note = 2'O-methyl-nucleotide
ttcaactggtttgtagactattt

SEQ ID NO: 369 - RNA, 22 nt, synthetic construct
  source 1..22: mol_type = other RNA
  modified_base 1: mod_base = OTHER; note = Inverted abasic nucleotide phosphorothioate
  modified_base 2: mod_base = OTHER; note = 2'O-methyl-nucleotide phosphorothioate
  modified_base 3: mod_base = OTHER; note = 2'O-methyl-nucleotide
  modified_base 4: mod_base = OTHER; note = 2'O-methyl-nucleotide
  modified_base 5: mod_base = OTHER; note = 2'O-methyl-nucleotide
  modified_base 6: mod_base = OTHER; note = 2'O-methyl-nucleotide
  modified_base 7: mod_base = OTHER; note = 2'O-methyl-nucleotide
  modified_base 8: mod_base = OTHER; note = 2'fluoro-nucleotide
  modified_base 9: mod_base = OTHER; note = 2'fluoro-nucleotide
  modified_base 10: mod_base = OTHER; note = 2'fluoro-nucleotide
  modified_base 11: mod_base = OTHER; note = 2'O-methyl-nucleotide
  modified_base 12: mod_base = OTHER; note = 2'O-methyl-nucleotide
  modified_base 13: mod_base = OTHER; note = 2'O-methyl-nucleotide
  modified_base 14: mod_base = OTHER; note = 2'O-methyl-nucleotide
  modified_base 15: mod_base = OTHER; note = 2'O-methyl-nucleotide
  modified_base 16: mod_base = OTHER; note = 2'O-methyl-nucleotide
  modified_base 17: mod_base = OTHER; note = 2'O-methyl-nucleotide
  modified_base 18: mod_base = OTHER; note = 2'O-methyl-nucleotide
  modified_base 19: mod_base = OTHER; note = 2'O-methyl-nucleotide
  modified_base 20: mod_base = OTHER; note = 2'O-methyl-nucleotide phosphorothioate
  modified_base 21: mod_base = OTHER; note = 2'O-methyl-nucleotide phosphorothioate
  modified_base 22: mod_base = OTHER; note = 2'O-methyl-nucleotide
nagtctacaaaccagttgacca

SEQ ID NO: 370 - RNA, 21 nt, synthetic construct
  source 1..21: mol_type = other RNA
  modified_base 1: mod_base = OTHER; note = Vinyl phosphonate 2'O-methyl-nucleotide phosphorothioate
  modified_base 2: mod_base = OTHER; note = 2'fluoro-nucleotide phosphorothioate
  modified_base 3: mod_base = OTHER; note = 2'O-methyl-nucleotide phosphorothioate
  modified_base 4: mod_base = OTHER; note = 2'O-methyl-nucleotide
  modified_base 5: mod_base = OTHER; note = 2'O-methyl-nucleotide
  modified_base 6: mod_base = OTHER; note = 2'fluoro-nucleotide
  modified_base 7: mod_base = OTHER; note = 2'O-methyl-nucleotide
  modified_base 8: mod_base = OTHER; note = 2'O-methyl-nucleotide
  modified_base 9: mod_base = OTHER; note = 2'O-methyl-nucleotide
  modified_base 10: mod_base = OTHER; note = 2'O-methyl-nucleotide
  modified_base 11: mod_base = OTHER; note = 2'O-methyl-nucleotide
  modified_base 12: mod_base = OTHER; note = 2'O-methyl-nucleotide
  modified_base 13: mod_base = OTHER; note = 2'O-methyl-nucleotide
  modified_base 14: mod_base = OTHER; note = 2'fluoro-nucleotide
  modified_base 15: mod_base = OTHER; note = 2'O-methyl-nucleotide
  modified_base 16: mod_base = OTHER; note = 2'fluoro-nucleotide
  modified_base 17: mod_base = OTHER; note = 2'O-methyl-nucleotide
  modified_base 18: mod_base = OTHER; note = 2'O-methyl-nucleotide
  modified_base 19: mod_base = OTHER; note = 2'O-methyl-nucleotide
  modified_base 20: mod_base = OTHER; note = 2'O-methyl-nucleotide phosphorothioate
  modified_base 21: mod_base = OTHER; note = 2'O-methyl-nucleotide
ttcaactggtttgtagactat

SEQ ID NO: 371 - RNA, 23 nt, synthetic construct
  source 1..23: mol_type = other RNA
  modified_base 1: mod_base = OTHER; note = Inverted abasic nucleotide phosphorothioate
  modified_base 2: mod_base = OTHER; note = 2'O-methyl-nucleotide phosphorothioate
  modified_base 3: mod_base = OTHER; note = 2'O-methyl-nucleotide
  modified_base 4: mod_base = OTHER; note = 2'O-methyl-nucleotide
  modified_base 5: mod_base = OTHER; note = 2'O-methyl-nucleotide
  modified_base 6: mod_base = OTHER; note = 2'O-methyl-nucleotide
  modified_base 7: mod_base = OTHER; note = 2'O-methyl-nucleotide
  modified_base 8: mod_base = OTHER; note = 2'O-methyl-nucleotide
  modified_base 9: mod_base = OTHER; note = 2'O-methyl-nucleotide
  modified_base 10: mod_base = OTHER; note = 2'fluoro-nucleotide
  modified_base 11: mod_base = OTHER; note = 2'fluoro-nucleotide
  modified_base 12: mod_base = OTHER; note = 2'fluoro-nucleotide
  modified_base 13: mod_base = OTHER; note = 2'O-methyl-nucleotide
  modified_base 14: mod_base = OTHER; note = 2'O-methyl-nucleotide
  modified_base 15: mod_base = OTHER; note = 2'O-methyl-nucleotide
  modified_base 16: mod_base = OTHER; note = 2'O-methyl-nucleotide
  modified_base 17: mod_base = OTHER; note = 2'O-methyl-nucleotide
  modified_base 18: mod_base = OTHER; note = 2'O-methyl-nucleotide
  modified_base 19: mod_base = OTHER; note = 2'O-methyl-nucleotide
  modified_base 20: mod_base = OTHER; note = 2'O-methyl-nucleotide
  modified_base 21: mod_base = OTHER; note = 2'O-methyl-nucleotide phosphorothioate
  modified_base 22: mod_base = OTHER; note = 2'O-methyl-nucleotide phosphorothioate
  modified_base 23: mod_base = OTHER; note = Inverted abasic nucleotide
natagtctacaaaccagttgaan

SEQ ID NO: 372 - RNA, 21 nt, synthetic construct
  source 1..21: mol_type = other RNA
  modified_base 1: mod_base = OTHER; note = Vinyl phosphonate 2'O-methyl-nucleotide phosphorothioate
  modified_base 2: mod_base = OTHER; note = 2'fluoro-nucleotide phosphorothioate
  modified_base 3: mod_base = OTHER; note = 2'O-methyl-nucleotide phosphorothioate
  modified_base 4: mod_base = OTHER; note = 2'fluoro-nucleotide
  modified_base 5: mod_base = OTHER; note = 2'O-methyl-nucleotide
  modified_base 6: mod_base = OTHER; note = 2'fluoro-nucleotide
  modified_base 7: mod_base = OTHER; note = 2'O-methyl-nucleotide
  modified_base 8: mod_base = OTHER; note = 2'fluoro-nucleotide
  modified_base 9: mod_base = OTHER; note = 2'O-methyl-nucleotide
  modified_base 10: mod_base = OTHER; note = 2'fluoro-nucleotide
  modified_base 11: mod_base = OTHER; note = 2'O-methyl-nucleotide
  modified_base 12: mod_base = OTHER; note = 2'fluoro-nucleotide
  modified_base 13: mod_base = OTHER; note = 2'O-methyl-nucleotide
  modified_base 14: mod_base = OTHER; note = 2'fluoro-nucleotide
  modified_base 15: mod_base = OTHER; note = 2'O-methyl-nucleotide
  modified_base 16: mod_base = OTHER; note = 2'fluoro-nucleotide
  modified_base 17: mod_base = OTHER; note = 2'O-methyl-nucleotide
  modified_base 18: mod_base = OTHER; note = 2'fluoro-nucleotide
  modified_base 19: mod_base = OTHER; note = 2'O-methyl-nucleotide
  modified_base 20: mod_base = OTHER; note = 2'O-methyl-nucleotide phosphorothioate
  modified_base 21: mod_base = OTHER; note = 2'O-methyl-nucleotide
ttcaactggtttgtagactat

SEQ ID NO: 373 - RNA, 21 nt, synthetic construct
  source 1..21: mol_type = other RNA
  modified_base 1: mod_base = OTHER; note = Inverted abasic nucleotide phosphorothioate
  modified_base 2: mod_base = OTHER; note = 2'O-methyl-nucleotide phosphorothioate
  modified_base 3: mod_base = OTHER; note = 2'O-methyl-nucleotide
  modified_base 4: mod_base = OTHER; note = 2'O-methyl-nucleotide
  modified_base 5: mod_base = OTHER; note = 2'O-methyl-nucleotide
  modified_base 6: mod_base = OTHER; note = 2'O-methyl-nucleotide
  modified_base 7: mod_base = OTHER; note = 2'O-methyl-nucleotide
  modified_base 8: mod_base = OTHER; note = 2'fluoro-nucleotide
  modified_base 9: mod_base = OTHER; note = 2'fluoro-nucleotide
  modified_base 10: mod_base = OTHER; note = 2'fluoro-nucleotide
  modified_base 11: mod_base = OTHER; note = 2'O-methyl-nucleotide
  modified_base 12: mod_base = OTHER; note = 2'O-methyl-nucleotide
  modified_base 13: mod_base = OTHER; note = 2'O-methyl-nucleotide
  modified_base 14: mod_base = OTHER; note = 2'O-methyl-nucleotide
  modified_base 15: mod_base = OTHER; note = 2'O-methyl-nucleotide
  modified_base 16: mod_base = OTHER; note = 2'O-methyl-nucleotide
  modified_base 17: mod_base = OTHER; note = 2'O-methyl-nucleotide
  modified_base 18: mod_base = OTHER; note = 2'O-methyl-nucleotide
  modified_base 19: mod_base = OTHER; note = 2'O-methyl-nucleotide phosphorothioate
  modified_base 20: mod_base = OTHER; note = 2'O-methyl-nucleotide phosphorothioate
  modified_base 21: mod_base = OTHER; note = Inverted abasic nucleotide
nagtctacaaaccagttgaan

SEQ ID NO: 374 - RNA, 23 nt, synthetic construct
  source 1..23: mol_type = other RNA
  modified_base 1: mod_base = OTHER; note = Vinyl phosphonate 2'O-methyl-nucleotide phosphorothioate
  modified_base 2: mod_base = OTHER; note = 2'fluoro-nucleotide phosphorothioate
  modified_base 3: mod_base = OTHER; note = 2'O-methyl-nucleotide
  modified_base 4: mod_base = OTHER; note = 2'O-methyl-nucleotide
  modified_base 5: mod_base = OTHER; note = 2'O-methyl-nucleotide
  modified_base 6: mod_base = OTHER; note = 2'fluoro-nucleotide
  modified_base 7: mod_base = OTHER; note = 2'O-methyl-nucleotide
  modified_base 8: mod_base = OTHER; note = 2'fluoro-nucleotide
  modified_base 9: mod_base = OTHER; note = 2'fluoro-nucleotide
  modified_base 10: mod_base = OTHER; note = 2'O-methyl-nucleotide
  modified_base 11: mod_base = OTHER; note = 2'O-methyl-nucleotide
  modified_base 12: mod_base = OTHER; note = 2'O-methyl-nucleotide
  modified_base 13: mod_base = OTHER; note = 2'O-methyl-nucleotide
  modified_base 14: mod_base = OTHER; note = 2'fluoro-nucleotide
  modified_base 15: mod_base = OTHER; note = 2'O-methyl-nucleotide
  modified_base 16: mod_base = OTHER; note = 2'fluoro-nucleotide
  modified_base 17: mod_base = OTHER; note = 2'O-methyl-nucleotide
  modified_base 18: mod_base = OTHER; note = 2'O-methyl-nucleotide
  modified_base 19: mod_base = OTHER; note = 2'O-methyl-nucleotide
  modified_base 20: mod_base = OTHER; note = 2'O-methyl-nucleotide
  modified_base 21: mod_base = OTHER; note = 2'O-methyl-nucleotide phosphorothioate
  modified_base 22: mod_base = OTHER; note = 2'O-methyl-nucleotide phosphorothioate
  modified_base 23: mod_base = OTHER; note = 2'O-methyl-nucleotide
ttcaactggtttgtagactattt

SEQ ID NO: 375 - RNA, 21 nt, synthetic construct
  source 1..21: mol_type = other RNA
  modified_base 1: mod_base = OTHER; note = 2'O-methyl-nucleotide phosphorothioate
  modified_base 2: mod_base = OTHER; note = 2'O-methyl-nucleotide phosphorothioate
  modified_base 3: mod_base = OTHER; note = 2'O-methyl-nucleotide
  modified_base 4: mod_base = OTHER; note = 2'O-methyl-nucleotide
  modified_base 5: mod_base = OTHER; note = 2'O-methyl-nucleotide
  modified_base 6: mod_base = OTHER; note = 2'O-methyl-nucleotide
  modified_base 7: mod_base = OTHER; note = 2'fluoro-nucleotide
  modified_base 8: mod_base = OTHER; note = 2'O-methyl-nucleotide
  modified_base 9: mod_base = OTHER; note = 2'fluoro-nucleotide
  modified_base 10: mod_base = OTHER; note = 2'fluoro-nucleotide
  modified_base 11: mod_base = OTHER; note = 2'fluoro-nucleotide
  modified_base 12: mod_base = OTHER; note = 2'O-methyl-nucleotide
  modified_base 13: mod_base = OTHER; note = 2'O-methyl-nucleotide
  modified_base 14: mod_base = OTHER; note = 2'O-methyl-nucleotide
  modified_base 15: mod_base = OTHER; note = 2'O-methyl-nucleotide
  modified_base 16: mod_base = OTHER; note = 2'O-methyl-nucleotide
  modified_base 17: mod_base = OTHER; note = 2'O-methyl-nucleotide
  modified_base 18: mod_base = OTHER; note = 2'O-methyl-nucleotide
  modified_base 19: mod_base = OTHER; note = 2'O-methyl-nucleotide phosphorothioate
  modified_base 20: mod_base = OTHER; note = 2'O-methyl-nucleotide phosphorothioate
  modified_base 21: mod_base = OTHER; note = 2'O-methyl-nucleotide
atagtctacaaaccagttgaa

SEQ ID NO: 376 - RNA, 21 nt, synthetic construct
  source 1..21: mol_type = other RNA
  modified_base 1: mod_base = OTHER; note = Vinyl phosphonate 2'O-methyl-nucleotide phosphorothioate
  modified_base 2: mod_base = OTHER; note = 2'fluoro-nucleotide phosphorothioate
  modified_base 3: mod_base = OTHER; note = 2'O-methyl-nucleotide phosphorothioate
  modified_base 4: mod_base = OTHER; note = 2'fluoro-nucleotide
  modified_base 5: mod_base = OTHER; note = 2'O-methyl-nucleotide
  modified_base 6: mod_base = OTHER; note = 2'fluoro-nucleotide
  modified_base 7: mod_base = OTHER; note = 2'O-methyl-nucleotide
  modified_base 8: mod_base = OTHER; note = 2'fluoro-nucleotide
  modified_base 9: mod_base = OTHER; note = 2'O-methyl-nucleotide
  modified_base 10: mod_base = OTHER; note = 2'fluoro-nucleotide
  modified_base 11: mod_base = OTHER; note = 2'O-methyl-nucleotide
  modified_base 12: mod_base = OTHER; note = 2'fluoro-nucleotide
  modified_base 13: mod_base = OTHER; note = 2'O-methyl-nucleotide
  modified_base 14: mod_base = OTHER; note = 2'fluoro-nucleotide
  modified_base 15: mod_base = OTHER; note = 2'O-methyl-nucleotide
  modified_base 16: mod_base = OTHER; note = 2'fluoro-nucleotide
  modified_base 17: mod_base = OTHER; note = 2'O-methyl-nucleotide
  modified_base 18: mod_base = OTHER; note = 2'fluoro-nucleotide
  modified_base 19: mod_base = OTHER; note = 2'O-methyl-nucleotide
  modified_base 20: mod_base = OTHER; note = 2'O-methyl-nucleotide phosphorothioate
  modified_base 21: mod_base = OTHER; note = 2'O-methyl-nucleotide
ttcaactggtttgtagactat

SEQ ID NO: 377 - RNA, 21 nt, synthetic construct
  source 1..21: mol_type = other RNA
  modified_base 1: mod_base = OTHER; note = Inverted abasic nucleotide phosphorothioate
  modified_base 2: mod_base = OTHER; note = 2'O-methyl-nucleotide phosphorothioate
  modified_base 3: mod_base = OTHER; note = 2'O-methyl-nucleotide
  modified_base 4: mod_base = OTHER; note = 2'O-methyl-nucleotide
  modified_base 5: mod_base = OTHER; note = 2'O-methyl-nucleotide
  modified_base 6: mod_base = OTHER; note = 2'O-methyl-nucleotide
  modified_base 7: mod_base = OTHER; note = 2'O-methyl-nucleotide
  modified_base 8: mod_base = OTHER; note = 2'fluoro-nucleotide
  modified_base 9: mod_base = OTHER; note = 2'fluoro-nucleotide
  modified_base 10: mod_base = OTHER; note = 2'fluoro-nucleotide
  modified_base 11: mod_base = OTHER; note = 2'O-methyl-nucleotide
  modified_base 12: mod_base = OTHER; note = 2'O-methyl-nucleotide
  modified_base 13: mod_base = OTHER; note = 2'O-methyl-nucleotide
  modified_base 14: mod_base = OTHER; note = 2'O-methyl-nucleotide
  modified_base 15: mod_base = OTHER; note = 2'O-methyl-nucleotide
  modified_base 16: mod_base = OTHER; note = 2'O-methyl-nucleotide
  modified_base 17: mod_base = OTHER; note = 2'O-methyl-nucleotide
  modified_base 18: mod_base = OTHER; note = 2'O-methyl-nucleotide
  modified_base 19: mod_base = OTHER; note = 2'O-methyl-nucleotide phosphorothioate
  modified_base 20: mod_base = OTHER; note = 2'O-methyl-nucleotide phosphorothioate
  modified_base 21: mod_base = OTHER; note = Inverted abasic nucleotide
nagtctacaaaccagttgaan

SEQ ID NO: 378 - RNA, 21 nt, synthetic construct
  source 1..21: mol_type = other RNA
  modified_base 1: mod_base = OTHER; note = Vinyl phosphonate 2'O-methyl-nucleotide phosphorothioate
  modified_base 2: mod_base = OTHER; note = 2'fluoro-nucleotide phosphorothioate
  modified_base 3: mod_base = OTHER; note = 2'O-methyl-nucleotide phosphorothioate
  modified_base 4: mod_base = OTHER; note = 2'O-methyl-nucleotide
  modified_base 5: mod_base = OTHER; note = 2'O-methyl-nucleotide
  modified_base 6: mod_base = OTHER; note = 2'fluoro-nucleotide
  modified_base 7: mod_base = OTHER; note = 2'O-methyl-nucleotide
  modified_base 8: mod_base = OTHER; note = 2'fluoro-nucleotide
  modified_base 9: mod_base = OTHER; note = 2'fluoro-nucleotide
  modified_base 10: mod_base = OTHER; note = 2'O-methyl-nucleotide
  modified_base 11: mod_base = OTHER; note = 2'O-methyl-nucleotide
  modified_base 12: mod_base = OTHER; note = 2'O-methyl-nucleotide
  modified_base 13: mod_base = OTHER; note = 2'O-methyl-nucleotide
  modified_base 14: mod_base = OTHER; note = 2'fluoro-nucleotide
  modified_base 15: mod_base = OTHER; note = 2'O-methyl-nucleotide
  modified_base 16: mod_base = OTHER; note = 2'fluoro-nucleotide
  modified_base 17: mod_base = OTHER; note = 2'O-methyl-nucleotide
  modified_base 18: mod_base = OTHER; note = 2'O-methyl-nucleotide
  modified_base 19: mod_base = OTHER; note = 2'O-methyl-nucleotide phosphorothioate
  modified_base 20: mod_base = OTHER; note = 2'O-methyl-nucleotide phosphorothioate
  modified_base 21: mod_base = OTHER; note = 2'O-methyl-nucleotide
ttcaactggtttgtagactat

SEQ ID NO: 379 - RNA, 19 nt, synthetic construct
  source 1..19: mol_type = other RNA
  modified_base 1: mod_base = OTHER; note = 2'O-methyl-nucleotide phosphorothioate
  modified_base 2: mod_base = OTHER; note = 2'O-methyl-nucleotide phosphorothioate
  modified_base 3: mod_base = OTHER; note = 2'O-methyl-nucleotide
  modified_base 4: mod_base = OTHER; note = 2'O-methyl-nucleotide
  modified_base 5: mod_base = OTHER; note = 2'fluoro-nucleotide
  modified_base 6: mod_base = OTHER; note = 2'O-methyl-nucleotide
  modified_base 7: mod_base = OTHER; note = 2'fluoro-nucleotide
  modified_base 8: mod_base = OTHER; note = 2'fluoro-nucleotide
  modified_base 9: mod_base = OTHER; note = 2'fluoro-nucleotide
  modified_base 10: mod_base = OTHER; note = 2'O-methyl-nucleotide
  modified_base 11: mod_base = OTHER; note = 2'O-methyl-nucleotide
  modified_base 12: mod_base = OTHER; note = 2'O-methyl-nucleotide
  modified_base 13: mod_base = OTHER; note = 2'O-methyl-nucleotide
  modified_base 14: mod_base = OTHER; note = 2'O-methyl-nucleotide
  modified_base 15: mod_base = OTHER; note = 2'O-methyl-nucleotide
  modified_base 16: mod_base = OTHER; note = 2'O-methyl-nucleotide
  modified_base 17: mod_base = OTHER; note = 2'O-methyl-nucleotide phosphorothioate
  modified_base 18: mod_base = OTHER; note = 2'O-methyl-nucleotide phosphorothioate
  modified_base 19: mod_base = OTHER; note = 2'O-methyl-nucleotide
agtctacaaaccagttgaa

SEQ ID NO: 380 - RNA, 21 nt, synthetic construct
  source 1..21: mol_type = other RNA
  modified_base 1: mod_base = OTHER; note = Vinyl phosphonate 2'O-methyl-nucleotide phosphorothioate
  modified_base 2: mod_base = OTHER; note = 2'fluoro-nucleotide phosphorothioate
  modified_base 3: mod_base = OTHER; note = 2'O-methyl-nucleotide phosphorothioate
  modified_base 4: mod_base = OTHER; note = 2'fluoro-nucleotide
  modified_base 5: mod_base = OTHER; note = 2'O-methyl-nucleotide
  modified_base 6: mod_base = OTHER; note = 2'fluoro-nucleotide
  modified_base 7: mod_base = OTHER; note = 2'O-methyl-nucleotide
  modified_base 8: mod_base = OTHER; note = 2'fluoro-nucleotide
  modified_base 9: mod_base = OTHER; note = 2'O-methyl-nucleotide
  modified_base 10: mod_base = OTHER; note = 2'fluoro-nucleotide
  modified_base 11: mod_base = OTHER; note = 2'O-methyl-nucleotide
  modified_base 12: mod_base = OTHER; note = 2'fluoro-nucleotide
  modified_base 13: mod_base = OTHER; note = 2'O-methyl-nucleotide
  modified_base 14: mod_base = OTHER; note = 2'fluoro-nucleotide
  modified_base 15: mod_base = OTHER; note = 2'O-methyl-nucleotide
  modified_base 16: mod_base = OTHER; note = 2'fluoro-nucleotide
  modified_base 17: mod_base = OTHER; note = 2'O-methyl-nucleotide
  modified_base 18: mod_base = OTHER; note = 2'fluoro-nucleotide
  modified_base 19: mod_base = OTHER; note = 2'O-methyl-nucleotide
  modified_base 20: mod_base = OTHER; note = 2'O-methyl-nucleotide phosphorothioate
  modified_base 21: mod_base = OTHER; note = 2'O-methyl-nucleotide
ttcaactggtttgtagactat

SEQ ID NO: 381 - RNA, 21 nt, synthetic construct
  source 1..21: mol_type = other RNA
  modified_base 1: mod_base = OTHER; note = Inverted abasic nucleotide phosphorothioate
  modified_base 2: mod_base = OTHER; note = 2'O-methyl-nucleotide phosphorothioate
  modified_base 3: mod_base = OTHER; note = 2'O-methyl-nucleotide
  modified_base 4: mod_base = OTHER; note = 2'O-methyl-nucleotide
  modified_base 5: mod_base = OTHER; note = 2'O-methyl-nucleotide
  modified_base 6: mod_base = OTHER; note = 2'O-methyl-nucleotide
  modified_base 7: mod_base = OTHER; note = 2'O-methyl-nucleotide
  modified_base 8: mod_base = OTHER; note = 2'fluoro-nucleotide
  modified_base 9: mod_base = OTHER; note = 2'fluoro-nucleotide
  modified_base 10: mod_base = OTHER; note = 2'fluoro-nucleotide
  modified_base 11: mod_base = OTHER; note = 2'O-methyl-nucleotide
  modified_base 12: mod_base = OTHER; note = 2'O-methyl-nucleotide
  modified_base 13: mod_base = OTHER; note = 2'O-methyl-nucleotide
  modified_base 14: mod_base = OTHER; note = 2'O-methyl-nucleotide
  modified_base 15: mod_base = OTHER; note = 2'O-methyl-nucleotide
  modified_base 16: mod_base = OTHER; note = 2'O-methyl-nucleotide
  modified_base 17: mod_base = OTHER; note = 2'O-methyl-nucleotide
  modified_base 18: mod_base = OTHER; note = 2'O-methyl-nucleotide
  modified_base 19: mod_base = OTHER; note = 2'O-methyl-nucleotide phosphorothioate
  modified_base 20: mod_base = OTHER; note = 2'O-methyl-nucleotide phosphorothioate
  modified_base 21: mod_base = OTHER; note = Inverted abasic nucleotide
nagtctacaaaccagttgaan

SEQ ID NO: 382 - RNA, 23 nt, synthetic construct
  source 1..23: mol_type = other RNA
  modified_base 1: mod_base = OTHER; note = Vinyl phosphonate 2'O-methyl-nucleotide phosphorothioate
  modified_base 2: mod_base = OTHER; note = 2'fluoro-nucleotide phosphorothioate
  modified_base 3: mod_base = OTHER; note = 2'O-methyl-nucleotide
  modified_base 4: mod_base = OTHER; note = 2'O-methyl-nucleotide
  modified_base 5: mod_base = OTHER; note = 2'O-methyl-nucleotide
  modified_base 6: mod_base = OTHER; note = 2'O-methyl-nucleotide
  modified_base 7: mod_base = OTHER; note = 2'fluoro-nucleotide
  modified_base 8: mod_base = OTHER; note = 2'O-methyl-nucleotide
  modified_base 9: mod_base = OTHER; note = 2'O-methyl-nucleotide
  modified_base 10: mod_base = OTHER; note = 2'O-methyl-nucleotide
  modified_base 11: mod_base = OTHER; note = 2'O-methyl-nucleotide
  modified_base 12: mod_base = OTHER; note = 2'fluoro-nucleotide
  modified_base 13: mod_base = OTHER; note = 2'O-methyl-nucleotide
  modified_base 14: mod_base = OTHER; note = 2'fluoro-nucleotide
  modified_base 15: mod_base = OTHER; note = 2'O-methyl-nucleotide
  modified_base 16: mod_base = OTHER; note = 2'O-methyl-nucleotide
  modified_base 17: mod_base = OTHER; note = 2'O-methyl-nucleotide
  modified_base 18: mod_base = OTHER; note = 2'O-methyl-nucleotide
  modified_base 19: mod_base = OTHER; note = 2'O-methyl-nucleotide
  modified_base 20: mod_base = OTHER; note = 2'O-methyl-nucleotide
  modified_base 21: mod_base = OTHER; note = 2'O-methyl-nucleotide phosphorothioate
  modified_base 22: mod_base = OTHER; note = 2'O-methyl-nucleotide phosphorothioate
  modified_base 23: mod_base = OTHER; note = 2'O-methyl-nucleotide
ttcaactggtttgtagactattt

SEQ ID NO: 383 - RNA, 21 nt, synthetic construct
  source 1..21: mol_type = other RNA
  modified_base 1: mod_base = OTHER; note = 2'O-methyl-nucleotide phosphorothioate
  modified_base 2: mod_base = OTHER; note = 2'O-methyl-nucleotide phosphorothioate
  modified_base 3: mod_base = OTHER; note = 2'O-methyl-nucleotide
  modified_base 4: mod_base = OTHER; note = 2'O-methyl-nucleotide
  modified_base 5: mod_base = OTHER; note = 2'O-methyl-nucleotide
  modified_base 6: mod_base = OTHER; note = 2'O-methyl-nucleotide
  modified_base 7: mod_base = OTHER; note = 2'O-methyl-nucleotide
  modified_base 8: mod_base = OTHER; note = 2'O-methyl-nucleotide
  modified_base 9: mod_base = OTHER; note = 2'fluoro-nucleotide
  modified_base 10: mod_base = OTHER; note = 2'O-methyl-nucleotide
  modified_base 11: mod_base = OTHER; note = 2'fluoro-nucleotide
  modified_base 12: mod_base = OTHER; note = 2'fluoro-nucleotide
  modified_base 13: mod_base = OTHER; note = 2'fluoro-nucleotide
  modified_base 14: mod_base = OTHER; note = 2'fluoro-nucleotide
  modified_base 15: mod_base = OTHER; note = 2'O-methyl-nucleotide
  modified_base 16: mod_base = OTHER; note = 2'O-methyl-nucleotide
  modified_base 17: mod_base = OTHER; note = 2'O-methyl-nucleotide
  modified_base 18: mod_base = OTHER; note = 2'O-methyl-nucleotide
  modified_base 19: mod_base = OTHER; note = 2'O-methyl-nucleotide
  modified_base 20: mod_base = OTHER; note = 2'O-methyl-nucleotide phosphorothioate
  modified_base 21: mod_base = OTHER; note = Inverted abasic nucleotide
tagtctacaaaccagttgaan

SEQ ID NO: 384 - RNA, 21 nt, synthetic construct
  source 1..21: mol_type = other RNA
  modified_base 1: mod_base = OTHER; note = Vinyl phosphonate 2'O-methyl-nucleotide phosphorothioate
  modified_base 2: mod_base = OTHER; note = 2'fluoro-nucleotide phosphorothioate
  modified_base 3: mod_base = OTHER; note = 2'O-methyl-nucleotide phosphorothioate
  modified_base 4: mod_base = OTHER; note = 2'fluoro-nucleotide
  modified_base 5: mod_base = OTHER; note = 2'O-methyl-nucleotide
  modified_base 6: mod_base = OTHER; note = 2'fluoro-nucleotide
  modified_base 7: mod_base = OTHER; note = 2'O-methyl-nucleotide
  modified_base 8: mod_base = OTHER; note = 2'fluoro-nucleotide
  modified_base 9: mod_base = OTHER; note = 2'O-methyl-nucleotide
  modified_base 10: mod_base = OTHER; note = 2'fluoro-nucleotide
  modified_base 11: mod_base = OTHER; note = 2'O-methyl-nucleotide
  modified_base 12: mod_base = OTHER; note = 2'fluoro-nucleotide
  modified_base 13: mod_base = OTHER; note = 2'O-methyl-nucleotide
  modified_base 14: mod_base = OTHER; note = 2'fluoro-nucleotide
  modified_base 15: mod_base = OTHER; note = 2'O-methyl-nucleotide
  modified_base 16: mod_base = OTHER; note = 2'fluoro-nucleotide
  modified_base 17: mod_base = OTHER; note = 2'O-methyl-nucleotide
  modified_base 18: mod_base = OTHER; note = 2'fluoro-nucleotide
  modified_base 19: mod_base = OTHER; note = 2'O-methyl-nucleotide
  modified_base 20: mod_base = OTHER; note = 2'O-methyl-nucleotide phosphorothioate
  modified_base 21: mod_base = OTHER; note = 2'O-methyl-nucleotide
ttcaactggtttgtagactat

SEQ ID NO: 385 - RNA, 23 nt, synthetic construct
  source 1..23: mol_type = other RNA
  modified_base 1: mod_base = OTHER; note = Inverted abasic nucleotide phosphorothioate
  modified_base 2: mod_base = OTHER; note = 2'O-methyl-nucleotide phosphorothioate
  modified_base 3: mod_base = OTHER; note = 2'O-methyl-nucleotide
  modified_base 4: mod_base = OTHER; note = 2'O-methyl-nucleotide
  modified_base 5: mod_base = OTHER; note = 2'O-methyl-nucleotide
  modified_base 6: mod_base = OTHER; note = 2'O-methyl-nucleotide
  modified_base 7: mod_base = OTHER; note = 2'O-methyl-nucleotide
  modified_base 8: mod_base = OTHER; note = 2'O-methyl-nucleotide
  modified_base 9: mod_base = OTHER; note = 2'O-methyl-nucleotide
  modified_base 10: mod_base = OTHER; note = 2'fluoro-nucleotide
  modified_base 11: mod_base = OTHER; note = 2'fluoro-nucleotide
  modified_base 12: mod_base = OTHER; note = 2'fluoro-nucleotide
  modified_base 13: mod_base = OTHER; note = 2'O-methyl-nucleotide
  modified_base 14: mod_base = OTHER; note = 2'O-methyl-nucleotide
  modified_base 15: mod_base = OTHER; note = 2'O-methyl-nucleotide
  modified_base 16: mod_base = OTHER; note = 2'O-methyl-nucleotide
  modified_base 17: mod_base = OTHER; note = 2'O-methyl-nucleotide
  modified_base 18: mod_base = OTHER; note = 2'O-methyl-nucleotide
  modified_base 19: mod_base = OTHER; note = 2'O-methyl-nucleotide
  modified_base 20: mod_base = OTHER; note = 2'O-methyl-nucleotide
  modified_base 21: mod_base = OTHER; note = 2'O-methyl-nucleotide phosphorothioate
  modified_base 22: mod_base = OTHER; note = 2'O-methyl-nucleotide phosphorothioate
  modified_base 23: mod_base = OTHER; note = Inverted abasic nucleotide
natagtctacaaaccagttgaan

SEQ ID NO: 386 - RNA, 23 nt, synthetic construct
  source 1..23: mol_type = other RNA
  modified_base 1: mod_base = OTHER; note = Vinyl phosphonate 2'O-methyl-nucleotide phosphorothioate
  modified_base 2: mod_base = OTHER; note = 2'fluoro-nucleotide phosphorothioate
  modified_base 3: mod_base = OTHER; note = 2'O-methyl-nucleotide
  modified_base 4: mod_base = OTHER; note = 2'O-methyl-nucleotide
  modified_base 5: mod_base = OTHER; note = 2'O-methyl-nucleotide
  modified_base 6: mod_base = OTHER; note = 2'fluoro-nucleotide
  modified_base 7: mod_base = OTHER; note = 2'O-methyl-nucleotide
  modified_base 8: mod_base = OTHER; note = 2'fluoro-nucleotide
  modified_base 9: mod_base = OTHER; note = 2'fluoro-nucleotide
  modified_base 10: mod_base = OTHER; note = 2'O-methyl-nucleotide
  modified_base 11: mod_base = OTHER; note = 2'O-methyl-nucleotide
  modified_base 12: mod_base = OTHER; note = 2'O-methyl-nucleotide
  modified_base 13: mod_base = OTHER; note = 2'O-methyl-nucleotide
  modified_base 14: mod_base = OTHER; note = 2'fluoro-nucleotide
  modified_base 15: mod_base = OTHER; note = 2'O-methyl-nucleotide
  modified_base 16: mod_base = OTHER; note = 2'fluoro-nucleotide
  modified_base 17: mod_base = OTHER; note = 2'O-methyl-nucleotide
  modified_base 18: mod_base = OTHER; note = 2'O-methyl-nucleotide
  modified_base 19: mod_base = OTHER; note = 2'O-methyl-nucleotide
  modified_base 20: mod_base = OTHER; note = 2'O-methyl-nucleotide
  modified_base 21: mod_base = OTHER; note = 2'O-methyl-nucleotide phosphorothioate
  modified_base 22: mod_base = OTHER; note = 2'O-methyl-nucleotide phosphorothioate
  modified_base 23: mod_base = OTHER; note = 2'O-methyl-nucleotide
ttcaactggtttgtagactattt

SEQ ID NO: 387 - RNA, 23 nt, synthetic construct
  source 1..23: mol_type = other RNA
  modified_base 1: mod_base = OTHER; note = Inverted abasic nucleotide phosphorothioate
  modified_base 2: mod_base = OTHER; note = 2'O-methyl-nucleotide phosphorothioate
  modified_base 3: mod_base = OTHER; note = 2'O-methyl-nucleotide
  modified_base 4: mod_base = OTHER; note = 2'O-methyl-nucleotide
  modified_base 5: mod_base = OTHER; note = 2'O-methyl-nucleotide
  modified_base 6: mod_base = OTHER; note = 2'O-methyl-nucleotide
  modified_base 7: mod_base = OTHER; note = 2'O-methyl-nucleotide
  modified_base 8: mod_base = OTHER; note = 2'O-methyl-nucleotide
  modified_base 9: mod_base = OTHER; note = 2'O-methyl-nucleotide
  modified_base 10: mod_base = OTHER; note = 2'fluoro-nucleotide
  modified_base 11: mod_base = OTHER; note = 2'fluoro-nucleotide
  modified_base 12: mod_base = OTHER; note = 2'fluoro-nucleotide
  modified_base 13: mod_base = OTHER; note = 2'O-methyl-nucleotide
  modified_base 14: mod_base = OTHER; note = 2'O-methyl-nucleotide
  modified_base 15: mod_base = OTHER; note = 2'O-methyl-nucleotide
  modified_base 16: mod_base = OTHER; note = 2'O-methyl-nucleotide
  modified_base 17: mod_base = OTHER; note = 2'O-methyl-nucleotide
  modified_base 18: mod_base = OTHER; note = 2'O-methyl-nucleotide
  modified_base 19: mod_base = OTHER; note = 2'O-methyl-nucleotide
  modified_base 20: mod_base = OTHER; note = 2'O-methyl-nucleotide
  modified_base 21: mod_base = OTHER; note = 2'O-methyl-nucleotide phosphorothioate
  modified_base 22: mod_base = OTHER; note = 2'O-methyl-nucleotide phosphorothioate
  modified_base 23: mod_base = OTHER; note = Inverted abasic nucleotide
natagtctacaaaccagttgaan

SEQ ID NO: 388 - RNA, 21 nt, synthetic construct
  source 1..21: mol_type = other RNA
  modified_base 1: mod_base = OTHER; note = Vinyl phosphonate 2'O-methyl-nucleotide phosphorothioate
  modified_base 2: mod_base = OTHER; note = 2'fluoro-nucleotide phosphorothioate
  modified_base 3: mod_base = OTHER; note = 2'O-methyl-nucleotide phosphorothioate
  modified_base 4: mod_base = OTHER; note = 2'O-methyl-nucleotide
  modified_base 5: mod_base = OTHER; note = 2'O-methyl-nucleotide
  modified_base 6: mod_base = OTHER; note = 2'fluoro-nucleotide
  modified_base 7: mod_base = OTHER; note = 2'O-methyl-nucleotide
  modified_base 8: mod_base = OTHER; note = 2'fluoro-nucleotide
  modified_base 9: mod_base = OTHER; note = 2'fluoro-nucleotide
  modified_base 10: mod_base = OTHER; note = 2'O-methyl-nucleotide
  modified_base 11: mod_base = OTHER; note = 2'O-methyl-nucleotide
  modified_base 12: mod_base = OTHER; note = 2'O-methyl-nucleotide
  modified_base 13: mod_base = OTHER; note = 2'O-methyl-nucleotide
  modified_base 14: mod_base = OTHER; note = 2'fluoro-nucleotide
  modified_base 15: mod_base = OTHER; note = 2'O-methyl-nucleotide
  modified_base 16: mod_base = OTHER; note = 2'fluoro-nucleotide
  modified_base 17: mod_base = OTHER; note = 2'O-methyl-nucleotide
  modified_base 18: mod_base = OTHER; note = 2'O-methyl-nucleotide
  modified_base 19: mod_base = OTHER; note = 2'O-methyl-nucleotide phosphorothioate
  modified_base 20: mod_base = OTHER; note = 2'O-methyl-nucleotide phosphorothioate
  modified_base 21: mod_base = OTHER; note = 2'O-methyl-nucleotide
ttcaactggtttgtagactat

SEQ ID NO: 389 - RNA, 23 nt, synthetic construct
  source 1..23: mol_type = other RNA
  modified_base 1: mod_base = OTHER; note = Inverted abasic nucleotide phosphorothioate
  modified_base 2: mod_base = OTHER; note = 2'O-methyl-nucleotide phosphorothioate
  modified_base 3: mod_base = OTHER; note = 2'O-methyl-nucleotide
  modified_base 4: mod_base = OTHER; note = 2'O-methyl-nucleotide
  modified_base 5: mod_base = OTHER; note = 2'O-methyl-nucleotide
  modified_base 6: mod_base = OTHER; note = 2'O-methyl-nucleotide
  modified_base 7: mod_base = OTHER; note = 2'O-methyl-nucleotide
  modified_base 8: mod_base = OTHER; note = 2'O-methyl-nucleotide
  modified_base 9: mod_base = OTHER; note = 2'O-methyl-nucleotide
  modified_base 10: mod_base = OTHER; note = 2'fluoro-nucleotide
  modified_base 11: mod_base = OTHER; note = 2'fluoro-nucleotide
  modified_base 12: mod_base = OTHER; note = 2'fluoro-nucleotide
  modified_base 13: mod_base = OTHER; note = 2'O-methyl-nucleotide
  modified_base 14: mod_base = OTHER; note = 2'O-methyl-nucleotide
  modified_base 15: mod_base = OTHER; note = 2'O-methyl-nucleotide
  modified_base 16: mod_base = OTHER; note = 2'O-methyl-nucleotide
  modified_base 17: mod_base = OTHER; note = 2'O-methyl-nucleotide
  modified_base 18: mod_base = OTHER; note = 2'O-methyl-nucleotide
  modified_base 19: mod_base = OTHER; note = 2'O-methyl-nucleotide
  modified_base 20: mod_base = OTHER; note = 2'O-methyl-nucleotide
  modified_base 21: mod_base = OTHER; note = 2'O-methyl-nucleotide phosphorothioate
  modified_base 22: mod_base = OTHER; note = 2'O-methyl-nucleotide phosphorothioate
  modified_base 23: mod_base = OTHER; note = Inverted abasic nucleotide
natagtctacaaaccagttgaan

SEQ ID NO: 390 - RNA, 23 nt, synthetic construct
  source 1..23: mol_type = other RNA
  modified_base 1: mod_base = OTHER; note = Vinyl phosphonate 2'O-methyl-nucleotide phosphorothioate
  modified_base 2: mod_base = OTHER; note = 2'fluoro-nucleotide phosphorothioate
  modified_base 3: mod_base = OTHER; note = 2'O-methyl-nucleotide
  modified_base 4: mod_base = OTHER; note = 2'O-methyl-nucleotide
  modified_base 5: mod_base = OTHER; note = 2'O-methyl-nucleotide
  modified_base 6: mod_base = OTHER; note = 2'O-methyl-nucleotide
  modified_base 7: mod_base = OTHER; note = 2'fluoro-nucleotide
  modified_base 8: mod_base = OTHER; note = 2'O-methyl-nucleotide
  modified_base 9: mod_base = OTHER; note = 2'O-methyl-nucleotide
  modified_base 10: mod_base = OTHER; note = 2'O-methyl-nucleotide
  modified_base 11: mod_base = OTHER; note = 2'O-methyl-nucleotide
  modified_base 12: mod_base = OTHER; note = 2'fluoro-nucleotide
  modified_base 13: mod_base = OTHER; note = 2'O-methyl-nucleotide
  modified_base 14: mod_base = OTHER; note = 2'fluoro-nucleotide
  modified_base 15: mod_base = OTHER; note = 2'O-methyl-nucleotide
  modified_base 16: mod_base = OTHER; note = 2'O-methyl-nucleotide
  modified_base 17: mod_base = OTHER; note = 2'O-methyl-nucleotide
  modified_base 18: mod_base = OTHER; note = 2'O-methyl-nucleotide
  modified_base 19: mod_base = OTHER; note = 2'O-methyl-nucleotide
  modified_base 20: mod_base = OTHER; note = 2'O-methyl-nucleotide
  modified_base 21: mod_base = OTHER; note = 2'O-methyl-nucleotide phosphorothioate
  modified_base 22: mod_base = OTHER; note = 2'O-methyl-nucleotide phosphorothioate
  modified_base 23: mod_base = OTHER; note = 2'O-methyl-nucleotide
ttcaactggtttgtagactattt

SEQ ID NO: 391 - RNA, 21 nt, synthetic construct
  source 1..21: mol_type = other RNA
  modified_base 1: mod_base = OTHER; note = 2'O-methyl-nucleotide phosphorothioate
  modified_base 2: mod_base = OTHER; note = 2'O-methyl-nucleotide phosphorothioate
  modified_base 3: mod_base = OTHER; note = 2'O-methyl-nucleotide
  modified_base 4: mod_base = OTHER; note = 2'O-methyl-nucleotide
  modified_base 5: mod_base = OTHER; note = 2'O-methyl-nucleotide
  modified_base 6: mod_base = OTHER; note = 2'O-methyl-nucleotide
  modified_base 7: mod_base = OTHER; note = 2'fluoro-nucleotide
  modified_base 8: mod_base = OTHER; note = 2'O-methyl-nucleotide
  modified_base 9: mod_base = OTHER; note = 2'fluoro-nucleotide
  modified_base 10: mod_base = OTHER; note = 2'fluoro-nucleotide
  modified_base 11: mod_base = OTHER; note = 2'fluoro-nucleotide
  modified_base 12: mod_base = OTHER; note = 2'O-methyl-nucleotide
  modified_base 13: mod_base = OTHER; note = 2'O-methyl-nucleotide
  modified_base 14: mod_base = OTHER; note = 2'O-methyl-nucleotide
  modified_base 15: mod_base = OTHER; note = 2'O-methyl-nucleotide
  modified_base 16: mod_base = OTHER; note = 2'O-methyl-nucleotide
  modified_base 17: mod_base = OTHER; note = 2'O-methyl-nucleotide
  modified_base 18: mod_base = OTHER; note = 2'O-methyl-nucleotide
  modified_base 19: mod_base = OTHER; note = 2'O-methyl-nucleotide phosphorothioate
  modified_base 20: mod_base = OTHER; note = 2'O-methyl-nucleotide phosphorothioate
  modified_base 21: mod_base = OTHER; note = 2'O-methyl-nucleotide
atagtctacaaaccagttgaa

SEQ ID NO: 392 - RNA, 23 nt, synthetic construct
  source 1..23: mol_type = other RNA
  modified_base 1: mod_base = OTHER; note = Vinyl phosphonate 2'O-methyl-nucleotide phosphorothioate
  modified_base 2: mod_base = OTHER; note = 2'fluoro-nucleotide phosphorothioate
  modified_base 3: mod_base = OTHER; note = 2'O-methyl-nucleotide
  modified_base 4: mod_base = OTHER; note = 2'O-methyl-nucleotide
  modified_base 5: mod_base = OTHER; note = 2'O-methyl-nucleotide
  modified_base 6: mod_base = OTHER; note = 2'fluoro-nucleotide
  modified_base 7: mod_base = OTHER; note = 2'O-methyl-nucleotide
  modified_base 8: mod_base = OTHER; note = 2'O-methyl-nucleotide
  modified_base 9: mod_base = OTHER; note = 2'fluoro-nucleotide
  modified_base 10: mod_base = OTHER; note = 2'O-methyl-nucleotide
  modified_base 11: mod_base = OTHER; note = 2'O-methyl-nucleotide
  modified_base 12: mod_base = OTHER; note = 2'O-methyl-nucleotide
  modified_base 13: mod_base = OTHER; note = 2'O-methyl-nucleotide
  modified_base 14: mod_base = OTHER; note = 2'fluoro-nucleotide
  modified_base 15: mod_base = OTHER; note = 2'O-methyl-nucleotide
  modified_base 16: mod_base = OTHER; note = 2'fluoro-nucleotide
  modified_base 17: mod_base = OTHER; note = 2'O-methyl-nucleotide
  modified_base 18: mod_base = OTHER; note = 2'O-methyl-nucleotide
  modified_base 19: mod_base = OTHER; note = 2'O-methyl-nucleotide
  modified_base 20: mod_base = OTHER; note = 2'O-methyl-nucleotide
  modified_base 21: mod_base = OTHER; note = 2'O-methyl-nucleotide phosphorothioate
  modified_base 22: mod_base = OTHER; note = 2'O-methyl-nucleotide phosphorothioate
  modified_base 23: mod_base = OTHER; note = 2'O-methyl-nucleotide
ttcaactggtttgtagactattt

SEQ ID NO: 393 - RNA, 21 nt, synthetic construct
  source 1..21: mol_type = other RNA
  modified_base 1: mod_base = OTHER; note = 2'O-methyl-nucleotide phosphorothioate
  modified_base 2: mod_base = OTHER; note = 2'O-methyl-nucleotide phosphorothioate
  modified_base 3: mod_base = OTHER; note = 2'O-methyl-nucleotide
  modified_base 4: mod_base = OTHER; note = 2'O-methyl-nucleotide
  modified_base 5: mod_base = OTHER; note = 2'O-methyl-nucleotide
  modified_base 6: mod_base = OTHER; note = 2'O-methyl-nucleotide
  modified_base 7: mod_base = OTHER; note = 2'fluoro-nucleotide
  modified_base 8: mod_base = OTHER; note = 2'O-methyl-nucleotide
  modified_base 9: mod_base = OTHER; note = 2'fluoro-nucleotide
  modified_base 10: mod_base = OTHER; note = 2'fluoro-nucleotide
  modified_base 11: mod_base = OTHER; note = 2'fluoro-nucleotide
  modified_base 12: mod_base = OTHER; note = 2'O-methyl-nucleotide
  modified_base 13: mod_base = OTHER; note = 2'O-methyl-nucleotide
  modified_base 14: mod_base = OTHER; note = 2'O-methyl-nucleotide
  modified_base 15: mod_base = OTHER; note = 2'O-methyl-nucleotide
  modified_base 16: mod_base = OTHER; note = 2'O-methyl-nucleotide
  modified_base 17: mod_base = OTHER; note = 2'O-methyl-nucleotide
  modified_base 18: mod_base = OTHER; note = 2'O-methyl-nucleotide
  modified_base 19: mod_base = OTHER; note = 2'O-methyl-nucleotide phosphorothioate
  modified_base 20: mod_base = OTHER; note = 2'O-methyl-nucleotide phosphorothioate
  modified_base 21: mod_base = OTHER; note = 2'O-methyl-nucleotide
atagtctacaaaccagttgaa

SEQ ID NO: 394 - RNA, 23 nt, synthetic construct
  source 1..23: mol_type = other RNA
  modified_base 1: mod_base = OTHER; note = Vinyl phosphonate 2'O-methyl-nucleotide phosphorothioate
  modified_base 2: mod_base = OTHER; note = 2'fluoro-nucleotide phosphorothioate
  modified_base 3: mod_base = OTHER; note = 2'O-methyl-nucleotide
  modified_base 4: mod_base = OTHER; note = 2'O-methyl-nucleotide
  modified_base 5: mod_base = OTHER; note = 2'O-methyl-nucleotide
  modified_base 6: mod_base = OTHER; note = 2'fluoro-nucleotide
  modified_base 7: mod_base = OTHER; note = 2'O-methyl-nucleotide
  modified_base 8: mod_base = OTHER; note = 2'fluoro-nucleotide
  modified_base 9: mod_base = OTHER; note = 2'O-methyl-nucleotide
  modified_base 10: mod_base = OTHER; note = 2'O-methyl-nucleotide
  modified_base 11: mod_base = OTHER; note = 2'O-methyl-nucleotide
  modified_base 12: mod_base = OTHER; note = 2'O-methyl-nucleotide
  modified_base 13: mod_base = OTHER; note = 2'O-methyl-nucleotide
  modified_base 14: mod_base = OTHER; note = 2'fluoro-nucleotide
  modified_base 15: mod_base = OTHER; note = 2'O-methyl-nucleotide
  modified_base 16: mod_base = OTHER; note = 2'fluoro-nucleotide
  modified_base 17: mod_base = OTHER; note = 2'O-methyl-nucleotide
  modified_base 18: mod_base = OTHER; note = 2'O-methyl-nucleotide
  modified_base 19: mod_base = OTHER; note = 2'O-methyl-nucleotide
  modified_base 20: mod_base = OTHER; note = 2'O-methyl-nucleotide
  modified_base 21: mod_base = OTHER; note = 2'O-methyl-nucleotide phosphorothioate
  modified_base 22: mod_base = OTHER; note = 2'O-methyl-nucleotide phosphorothioate
  modified_base 23: mod_base = OTHER; note = 2'O-methyl-nucleotide
ttcaactggtttgtagactattt

SEQ ID NO: 395 - RNA, 21 nt, synthetic construct
  source 1..21: mol_type = other RNA
  modified_base 1: mod_base = OTHER; note = 2'O-methyl-nucleotide phosphorothioate
  modified_base 2: mod_base = OTHER; note = 2'O-methyl-nucleotide phosphorothioate
  modified_base 3: mod_base = OTHER; note = 2'O-methyl-nucleotide
  modified_base 4: mod_base = OTHER; note = 2'O-methyl-nucleotide
  modified_base 5: mod_base = OTHER; note = 2'O-methyl-nucleotide
  modified_base 6: mod_base = OTHER; note = 2'O-methyl-nucleotide
  modified_base 7: mod_base = OTHER; note = 2'fluoro-nucleotide
  modified_base 8: mod_base = OTHER; note = 2'O-methyl-nucleotide
  modified_base 9: mod_base = OTHER; note = 2'fluoro-nucleotide
  modified_base 10: mod_base = OTHER; note = 2'fluoro-nucleotide
  modified_base 11: mod_base = OTHER; note = 2'fluoro-nucleotide
  modified_base 12: mod_base = OTHER; note = 2'O-methyl-nucleotide
  modified_base 13: mod_base = OTHER; note = 2'O-methyl-nucleotide
  modified_base 14: mod_base = OTHER; note = 2'O-methyl-nucleotide
  modified_base 15: mod_base = OTHER; note = 2'O-methyl-nucleotide
  modified_base 16: mod_base = OTHER; note = 2'O-methyl-nucleotide
  modified_base 17: mod_base = OTHER; note = 2'O-methyl-nucleotide
  modified_base 18: mod_base = OTHER; note = 2'O-methyl-nucleotide
  modified_base 19: mod_base = OTHER; note = 2'O-methyl-nucleotide phosphorothioate
  modified_base 20: mod_base = OTHER; note = 2'O-methyl-nucleotide phosphorothioate
  modified_base 21: mod_base = OTHER; note = 2'O-methyl-nucleotide
atagtctacaaaccagttgaa

SEQ ID NO: 396 - RNA, 23 nt, synthetic construct
  source 1..23: mol_type = other RNA
  modified_base 1: mod_base = OTHER; note = Vinyl phosphonate 2'O-methyl-nucleotide phosphorothioate
  modified_base 2: mod_base = OTHER; note = 2'fluoro-nucleotide phosphorothioate
  modified_base 3: mod_base = OTHER; note = 2'O-methyl-nucleotide
  modified_base 4: mod_base = OTHER; note = 2'O-methyl-nucleotide
  modified_base 5: mod_base = OTHER; note = 2'O-methyl-nucleotide
  modified_base 6: mod_base = OTHER; note = 2'fluoro-nucleotide
  modified_base 7: mod_base = OTHER; note = 2'O-methyl-nucleotide
  modified_base 8: mod_base = OTHER; note = 2'O-methyl-nucleotide
  modified_base 9: mod_base = OTHER; note = 2'O-methyl-nucleotide
  modified_base 10: mod_base = OTHER; note = 2'O-methyl-nucleotide
  modified_base 11: mod_base = OTHER; note = 2'O-methyl-nucleotide
  modified_base 12: mod_base = OTHER; note = 2'O-methyl-nucleotide
  modified_base 13: mod_base = OTHER; note = 2'O-methyl-nucleotide
  modified_base 14: mod_base = OTHER; note = 2'fluoro-nucleotide
  modified_base 15: mod_base = OTHER; note = 2'O-methyl-nucleotide
  modified_base 16: mod_base = OTHER; note = 2'fluoro-nucleotide
  modified_base 17: mod_base = OTHER; note = 2'O-methyl-nucleotide
  modified_base 18: mod_base = OTHER; note = 2'O-methyl-nucleotide
  modified_base 19: mod_base = OTHER; note = 2'O-methyl-nucleotide
  modified_base 20: mod_base = OTHER; note = 2'O-methyl-nucleotide
  modified_base 21: mod_base = OTHER; note = 2'O-methyl-nucleotide phosphorothioate
  modified_base 22: mod_base = OTHER; note = 2'O-methyl-nucleotide phosphorothioate
  modified_base 23: mod_base = OTHER; note = 2'O-methyl-nucleotide
ttcaactggtttgtagactattt

SEQ ID NO: 397 - RNA, 23 nt, synthetic construct
  source 1..23: mol_type = other RNA
  modified_base 1: mod_base = OTHER; note = Inverted abasic nucleotide phosphorothioate
  modified_base 2: mod_base = OTHER; note = 2'O-methyl-nucleotide phosphorothioate
  modified_base 3: mod_base = OTHER; note = 2'O-methyl-nucleotide
  modified_base 4: mod_base = OTHER; note = 2'O-methyl-nucleotide
  modified_base 5: mod_base = OTHER; note = 2'O-methyl-nucleotide
  modified_base 6: mod_base = OTHER; note = 2'O-methyl-nucleotide
  modified_base 7: mod_base = OTHER; note = 2'O-methyl-nucleotide
  modified_base 8: mod_base = OTHER; note = 2'O-methyl-nucleotide
  modified_base 9: mod_base = OTHER; note = 2'O-methyl-nucleotide
  modified_base 10: mod_base = OTHER; note = 2'fluoro-nucleotide
  modified_base 11: mod_base = OTHER; note = 2'fluoro-nucleotide
  modified_base 12: mod_base = OTHER; note = 2'fluoro-nucleotide
  modified_base 13: mod_base = OTHER; note = 2'O-methyl-nucleotide
  modified_base 14: mod_base = OTHER; note = 2'O-methyl-nucleotide
  modified_base 15: mod_base = OTHER; note = 2'O-methyl-nucleotide
  modified_base 16: mod_base = OTHER; note = 2'O-methyl-nucleotide
  modified_base 17: mod_base = OTHER; note = 2'O-methyl-nucleotide
  modified_base 18: mod_base = OTHER; note = 2'O-methyl-nucleotide
  modified_base 19: mod_base = OTHER; note = 2'O-methyl-nucleotide
  modified_base 20: mod_base = OTHER; note = 2'O-methyl-nucleotide
  modified_base 21: mod_base = OTHER; note = 2'O-methyl-nucleotide phosphorothioate
  modified_base 22: mod_base = OTHER; note = 2'O-methyl-nucleotide phosphorothioate
  modified_base 23: mod_base = OTHER; note = Inverted abasic nucleotide
natagtctacaaaccagttgaan

SEQ ID NO: 398 - RNA, 21 nt, synthetic construct
  source 1..21: mol_type = other RNA
  modified_base 1: mod_base = OTHER; note = Vinyl phosphonate 2'O-methyl-nucleotide phosphorothioate
  modified_base 2: mod_base = OTHER; note = 2'fluoro-nucleotide phosphorothioate
  modified_base 3: mod_base = OTHER; note = 2'O-methyl-nucleotide
  modified_base 4: mod_base = OTHER; note = 2'O-methyl-nucleotide
  modified_base 5: mod_base = OTHER; note = 2'O-methyl-nucleotide
  modified_base 6: mod_base = OTHER; note = 2'O-methyl-nucleotide
  modified_base 7: mod_base = OTHER; note = Unlocked nucleotide
  modified_base 8: mod_base = OTHER; note = 2'O-methyl-nucleotide
  modified_base 9: mod_base = OTHER; note = 2'O-methyl-nucleotide
  modified_base 10: mod_base = OTHER; note = 2'O-methyl-nucleotide
  modified_base 11: mod_base = OTHER; note = 2'O-methyl-nucleotide
  modified_base 12: mod_base = OTHER; note = 2'O-methyl-nucleotide
  modified_base 13: mod_base = OTHER; note = 2'O-methyl-nucleotide
  modified_base 14: mod_base = OTHER; note = 2'fluoro-nucleotide
  modified_base 15: mod_base = OTHER; note = 2'O-methyl-nucleotide
  modified_base 16: mod_base = OTHER; note = 2'fluoro-nucleotide
  modified_base 17: mod_base = OTHER; note = 2'O-methyl-nucleotide
  modified_base 18: mod_base = OTHER; note = 2'O-methyl-nucleotide
  modified_base 19: mod_base = OTHER; note = 2'O-methyl-nucleotide phosphorothioate
  modified_base 20: mod_base = OTHER; note = 2'O-methyl-nucleotide phosphorothioate
  modified_base 21: mod_base = OTHER; note = 2'O-methyl-nucleotide
ttcaactggtttgtagactat

SEQ ID NO: 399 - RNA, 21 nt, synthetic construct
  source 1..21: mol_type = other RNA
  modified_base 1: mod_base = OTHER; note = Inverted abasic nucleotide phosphorothioate
  modified_base 2: mod_base = OTHER; note = 2'O-methyl-nucleotide phosphorothioate
  modified_base 3: mod_base = OTHER; note = 2'O-methyl-nucleotide
  modified_base 4: mod_base = OTHER; note = 2'O-methyl-nucleotide
  modified_base 5: mod_base = OTHER; note = 2'O-methyl-nucleotide
  modified_base 6: mod_base = OTHER; note = 2'O-methyl-nucleotide
  modified_base 7: mod_base = OTHER; note = 2'O-methyl-nucleotide
  modified_base 8: mod_base = OTHER; note = 2'fluoro-nucleotide
  modified_base 9: mod_base = OTHER; note = 2'fluoro-nucleotide
  modified_base 10: mod_base = OTHER; note = 2'fluoro-nucleotide
  modified_base 11: mod_base = OTHER; note = 2'O-methyl-nucleotide
  modified_base 12: mod_base = OTHER; note = 2'O-methyl-nucleotide
  modified_base 13: mod_base = OTHER; note = 2'O-methyl-nucleotide
  modified_base 14: mod_base = OTHER; note = 2'O-methyl-nucleotide
  modified_base 15: mod_base = OTHER; note = 2'O-methyl-nucleotide
  modified_base 16: mod_base = OTHER; note = 2'O-methyl-nucleotide
  modified_base 17: mod_base = OTHER; note = 2'O-methyl-nucleotide
  modified_base 18: mod_base = OTHER; note = 2'O-methyl-nucleotide
  modified_base 19: mod_base = OTHER; note = 2'O-methyl-nucleotide phosphorothioate
  modified_base 20: mod_base = OTHER; note = 2'O-methyl-nucleotide phosphorothioate
  modified_base 21: mod_base = OTHER; note = Inverted abasic nucleotide
nagtctacaaaccagttgaan

SEQ ID NO: 400 - RNA, 23 nt, synthetic construct
  source 1..23: mol_type = other RNA
  modified_base 1: mod_base = OTHER; note = Vinyl phosphonate 2'O-methyl-nucleotide phosphorothioate
  modified_base 2: mod_base = OTHER; note = 2'fluoro-nucleotide phosphorothioate
  modified_base 3: mod_base = OTHER; note = 2'O-methyl-nucleotide
  modified_base 4: mod_base = OTHER; note = 2'O-methyl-nucleotide
  modified_base 5: mod_base = OTHER; note = 2'O-methyl-nucleotide
  modified_base 6: mod_base = OTHER; note = 2'O-methyl-nucleotide
  modified_base 7: mod_base = OTHER; note = Unlocked nucleotide
  modified_base 8: mod_base = OTHER; note = 2'O-methyl-nucleotide
  modified_base 9: mod_base = OTHER; note = 2'O-methyl-nucleotide
  modified_base 10: mod_base = OTHER; note = 2'O-methyl-nucleotide
  modified_base 11: mod_base = OTHER; note = 2'O-methyl-nucleotide
  modified_base 12: mod_base = OTHER; note = 2'O-methyl-nucleotide
  modified_base 13: mod_base = OTHER; note = 2'O-methyl-nucleotide
  modified_base 14: mod_base = OTHER; note = 2'fluoro-nucleotide
  modified_base 15: mod_base = OTHER; note = 2'O-methyl-nucleotide
  modified_base 16: mod_base = OTHER; note = 2'fluoro-nucleotide
  modified_base 17: mod_base = OTHER; note = 2'O-methyl-nucleotide
  modified_base 18: mod_base = OTHER; note = 2'O-methyl-nucleotide
  modified_base 19: mod_base = OTHER; note = 2'O-methyl-nucleotide
  modified_base 20: mod_base = OTHER; note = 2'O-methyl-nucleotide
  modified_base 21: mod_base = OTHER; note = 2'O-methyl-nucleotide phosphorothioate
  modified_base 22: mod_base = OTHER; note = 2'O-methyl-nucleotide phosphorothioate
  modified_base 23: mod_base = OTHER; note = 2'O-methyl-nucleotide
ttcaactggtttgtagactattt

SEQ ID NO: 401 - DNA, 23 bp, synthetic construct
  source 1..23: mol_type = other DNA
  modified_base 1: mod_base = OTHER; note = Inverted abasic nucleotide phosphorothioate
  modified_base 2: mod_base = OTHER; note = 2'O-methyl-nucleotide phosphorothioate
  modified_base 3: mod_base = OTHER; note = 2'O-methyl-nucleotide
  modified_base 4: mod_base = OTHER; note = 2'O-methyl-nucleotide
  modified_base 5: mod_base = OTHER; note = 2'O-methyl-nucleotide
  modified_base 6: mod_base = OTHER; note = 2'O-methyl-nucleotide
  modified_base 7: mod_base = OTHER; note = 2'O-methyl-nucleotide
  modified_base 8: mod_base = OTHER; note = 2'O-methyl-nucleotide
  modified_base 9: mod_base = OTHER; note = 2'O-methyl-nucleotide
  modified_base 10: mod_base = OTHER; note = 2'fluoro-nucleotide
  modified_base 11: mod_base = OTHER; note = 2'fluoro-nucleotide
  modified_base 13: mod_base = OTHER; note = 2'O-methyl-nucleotide
  modified_base 14: mod_base = OTHER; note = 2'O-methyl-nucleotide
  modified_base 15: mod_base = OTHER; note = 2'O-methyl-nucleotide
  modified_base 16: mod_base = OTHER; note = 2'O-methyl-nucleotide
  modified_base 17: mod_base = OTHER; note = 2'O-methyl-nucleotide
  modified_base 18: mod_base = OTHER; note = 2'O-methyl-nucleotide
  modified_base 19: mod_base = OTHER; note = 2'O-methyl-nucleotide
  modified_base 20: mod_base = OTHER; note = 2'O-methyl-nucleotide
  modified_base 21: mod_base = OTHER; note = 2'O-methyl-nucleotide phosphorothioate
  modified_base 22: mod_base = OTHER; note = 2'O-methyl-nucleotide phosphorothioate
  modified_base 23: mod_base = OTHER; note = Inverted abasic nucleotide
  misc_feature 1..11: note = RNA
  misc_feature 12: note = DNA
  misc_feature 13..23: note = RNA
natagtctacaaaccagttgaan

SEQ ID NO: 402 - RNA, 21 nt, synthetic construct
  source 1..21: mol_type = other RNA
  modified_base 1: mod_base = OTHER; note = Vinyl phosphonate 2'O-methyl-nucleotide phosphorothioate
  modified_base 2: mod_base = OTHER; note = 2'fluoro-nucleotide phosphorothioate
  modified_base 3: mod_base = OTHER; note = 2'O-methyl-nucleotide
  modified_base 4: mod_base = OTHER; note = 2'O-methyl-nucleotide
  modified_base 5: mod_base = OTHER; note = 2'O-methyl-nucleotide
  modified_base 6: mod_base = OTHER; note = 2'fluoro-nucleotide
  modified_base 7: mod_base = OTHER; note = 2'O-methyl-nucleotide
  modified_base 8: mod_base = OTHER; note = 2'fluoro-nucleotide
  modified_base 9: mod_base = OTHER; note = 2'fluoro-nucleotide
  modified_base 10: mod_base = OTHER; note = 2'O-methyl-nucleotide
  modified_base 11: mod_base = OTHER; note = 2'O-methyl-nucleotide
  modified_base 12: mod_base = OTHER; note = 2'O-methyl-nucleotide
  modified_base 13: mod_base = OTHER; note = 2'O-methyl-nucleotide
  modified_base 14: mod_base = OTHER; note = 2'fluoro-nucleotide
  modified_base 15: mod_base = OTHER; note = 2'O-methyl-nucleotide
  modified_base 16: mod_base = OTHER; note = 2'fluoro-nucleotide
  modified_base 17: mod_base = OTHER; note = 2'O-methyl-nucleotide
  modified_base 18: mod_base = OTHER; note = 2'O-methyl-nucleotide
  modified_base 19: mod_base = OTHER; note = 2'O-methyl-nucleotide phosphorothioate
  modified_base 20: mod_base = OTHER; note = 2'O-methyl-nucleotide phosphorothioate
  modified_base 21: mod_base = OTHER; note = 2'O-methyl-nucleotide
ttcaactggtttgtagactat

SEQ ID NO: 403 - RNA, 23 nt, synthetic construct
  source 1..23: mol_type = other RNA
  modified_base 1: mod_base = OTHER; note = Inverted abasic nucleotide phosphorothioate
  modified_base 2: mod_base = OTHER; note = 2'O-methyl-nucleotide phosphorothioate
  modified_base 3: mod_base = OTHER; note = 2'O-methyl-nucleotide
  modified_base 4: mod_base = OTHER; note = 2'O-methyl-nucleotide
  modified_base 5: mod_base = OTHER; note = 2'O-methyl-nucleotide
  modified_base 6: mod_base = OTHER; note = 2'O-methyl-nucleotide
  modified_base 7: mod_base = OTHER; note = 2'O-methyl-nucleotide
  modified_base 8: mod_base = OTHER; note = 2'O-methyl-nucleotide
  modified_base 9: mod_base = OTHER; note = 2'O-methyl-nucleotide
  modified_base 10: mod_base = OTHER; note = 2'fluoro-nucleotide
  modified_base 11: mod_base = OTHER; note = 2'fluoro-nucleotide
  modified_base 12: mod_base = OTHER; note = 2'fluoro-nucleotide
  modified_base 13: mod_base = OTHER; note = 2'O-methyl-nucleotide
  modified_base 14: mod_base = OTHER; note = 2'O-methyl-nucleotide
  modified_base 15: mod_base = OTHER; note = 2'O-methyl-nucleotide
  modified_base 16: mod_base = OTHER; note = 2'O-methyl-nucleotide
  modified_base 17: mod_base = OTHER; note = 2'O-methyl-nucleotide
  modified_base 18: mod_base = OTHER; note = 2'O-methyl-nucleotide
  modified_base 19: mod_base = OTHER; note = 2'O-methyl-nucleotide
  modified_base 20: mod_base = OTHER; note = 2'O-methyl-nucleotide
  modified_base 21: mod_base = OTHER; note = 2'O-methyl-nucleotide phosphorothioate
  modified_base 22: mod_base = OTHER; note = 2'O-methyl-nucleotide phosphorothioate
  modified_base 23: mod_base = OTHER; note = Inverted abasic nucleotide
natagtctacaaaccagttgaan

SEQ ID NO: 404 - RNA, 21 nt, synthetic construct
  source 1..21: mol_type = other RNA
  modified_base 1: mod_base = OTHER; note = Vinyl phosphonate 2'O-methyl-nucleotide phosphorothioate
  modified_base 2: mod_base = OTHER; note = 2'fluoro-nucleotide phosphorothioate
  modified_base 3: mod_base = OTHER; note = 2'O-methyl-nucleotide phosphorothioate
  modified_base 4: mod_base = OTHER; note = 2'O-methyl-nucleotide
  modified_base 5: mod_base = OTHER; note = 2'O-methyl-nucleotide
  modified_base 6: mod_base = OTHER; note = 2'fluoro-nucleotide
  modified_base 7: mod_base = OTHER; note = 2'O-methyl-nucleotide
  modified_base 8: mod_base = OTHER; note = 2'fluoro-nucleotide
  modified_base 9: mod_base = OTHER; note = 2'fluoro-nucleotide
  modified_base 10: mod_base = OTHER; note = 2'O-methyl-nucleotide
  modified_base 11: mod_base = OTHER; note = 2'O-methyl-nucleotide
  modified_base 12: mod_base = OTHER; note = 2'O-methyl-nucleotide
  modified_base 13: mod_base = OTHER; note = 2'O-methyl-nucleotide
  modified_base 14: mod_base = OTHER; note = 2'fluoro-nucleotide
  modified_base 15: mod_base = OTHER; note = 2'O-methyl-nucleotide
  modified_base 16: mod_base = OTHER; note = 2'fluoro-nucleotide
  modified_base 17: mod_base = OTHER; note = 2'O-methyl-nucleotide
  modified_base 18: mod_base = OTHER; note = 2'O-methyl-nucleotide
  modified_base 19: mod_base = OTHER; note = 2'O-methyl-nucleotide
  modified_base 20: mod_base = OTHER; note = 2'O-methyl-nucleotide phosphorothioate
  modified_base 21: mod_base = OTHER; note = 2'O-methyl-nucleotide
ttcaactggtttgtagactat

SEQ ID NO: 405 - RNA, 19 nt, synthetic construct
  source 1..19: mol_type = other RNA
  modified_base 1: mod_base = OTHER; note = 2'O-methyl-nucleotide phosphorothioate
  modified_base 2: mod_base = OTHER; note = 2'O-methyl-nucleotide phosphorothioate
  modified_base 3: mod_base = OTHER; note = 2'fluoro-nucleotide
  modified_base 4: mod_base = OTHER; note = 2'O-methyl-nucleotide
  modified_base 5: mod_base = OTHER; note = 2'O-methyl-nucleotide
  modified_base 6: mod_base = OTHER; note = 2'O-methyl-nucleotide
  modified_base 7: mod_base = OTHER; note = 2'fluoro-nucleotide
  modified_base 8: mod_base = OTHER; note = 2'fluoro-nucleotide
  modified_base 9: mod_base = OTHER; note = 2'fluoro-nucleotide
  modified_base 10: mod_base = OTHER; note = 2'O-methyl-nucleotide
  modified_base 11: mod_base = OTHER; note = 2'O-methyl-nucleotide
  modified_base 12: mod_base = OTHER; note = 2'fluoro-nucleotide
  modified_base 13: mod_base = OTHER; note = 2'O-methyl-nucleotide
  modified_base 14: mod_base = OTHER; note = 2'O-methyl-nucleotide
  modified_base 15: mod_base = OTHER; note = 2'O-methyl-nucleotide
  modified_base 16: mod_base = OTHER; note = 2'O-methyl-nucleotide
  modified_base 17: mod_base = OTHER; note = 2'fluoro-nucleotide phosphorothioate
  modified_base 18: mod_base = OTHER; note = 2'O-methyl-nucleotide phosphorothioate
  modified_base 19: mod_base = OTHER; note = 2'O-methyl-nucleotide
agtctacaaaccagttgaa

SEQ ID NO: 406 - RNA, 21 nt, synthetic construct
  source 1..21: mol_type = other RNA
  modified_base 1: mod_base = OTHER; note = Vinyl phosphonate 2'O-methyl-nucleotide phosphorothioate
  modified_base 2: mod_base = OTHER; note = 2'fluoro-nucleotide phosphorothioate
  modified_base 3: mod_base = OTHER; note = 2'O-methyl-nucleotide phosphorothioate
  modified_base 4: mod_base = OTHER; note = 2'O-methyl-nucleotide
  modified_base 5: mod_base = OTHER; note = 2'O-methyl-nucleotide
  modified_base 6: mod_base = OTHER; note = 2'fluoro-nucleotide
  modified_base 7: mod_base = OTHER; note = Unlocked nucleotide
  modified_base 8: mod_base = OTHER; note = 2'O-methyl-nucleotide
  modified_base 9: mod_base = OTHER; note = 2'O-methyl-nucleotide
  modified_base 10: mod_base = OTHER; note = 2'O-methyl-nucleotide
  modified_base 11: mod_base = OTHER; note = 2'O-methyl-nucleotide
  modified_base 12: mod_base = OTHER; note = 2'O-methyl-nucleotide
  modified_base 13: mod_base = OTHER; note = 2'O-methyl-nucleotide
  modified_base 14: mod_base = OTHER; note = 2'fluoro-nucleotide
  modified_base 15: mod_base = OTHER; note = 2'O-methyl-nucleotide
  modified_base 16: mod_base = OTHER; note = 2'fluoro-nucleotide
  modified_base 17: mod_base = OTHER; note = 2'O-methyl-nucleotide
  modified_base 18: mod_base = OTHER; note = 2'O-methyl-nucleotide
  modified_base 19: mod_base = OTHER; note = 2'O-methyl-nucleotide
  modified_base 20: mod_base = OTHER; note = 2'O-methyl-nucleotide phosphorothioate
  modified_base 21: mod_base = OTHER; note = 2'O-methyl-nucleotide
ttcaactggtttgtagactat

SEQ ID NO: 407 - RNA, 20 nt, synthetic construct
  source 1..20: mol_type = other RNA
  modified_base 1: mod_base = OTHER; note = Inverted abasic nucleotide phosphorothioate
  modified_base 2: mod_base = OTHER; note = 2'O-methyl-nucleotide phosphorothioate
  modified_base 3: mod_base = OTHER; note = 2'O-methyl-nucleotide
  modified_base 4: mod_base = OTHER; note = 2'fluoro-nucleotide
  modified_base 5: mod_base = OTHER; note = 2'O-methyl-nucleotide
  modified_base 6: mod_base = OTHER; note = 2'O-methyl-nucleotide
  modified_base 7: mod_base = OTHER; note = 2'O-methyl-nucleotide
  modified_base 8: mod_base = OTHER; note = 2'fluoro-nucleotide
  modified_base 9: mod_base = OTHER; note = 2'fluoro-nucleotide
  modified_base 10: mod_base = OTHER; note = 2'fluoro-nucleotide
  modified_base 11: mod_base = OTHER; note = 2'O-methyl-nucleotide
  modified_base 12: mod_base = OTHER; note = 2'O-methyl-nucleotide
  modified_base 13: mod_base = OTHER; note = 2'fluoro-nucleotide
  modified_base 14: mod_base = OTHER; note = 2'O-methyl-nucleotide
  modified_base 15: mod_base = OTHER; note = 2'O-methyl-nucleotide
  modified_base 16: mod_base = OTHER; note = 2'O-methyl-nucleotide
  modified_base 17: mod_base = OTHER; note = 2'O-methyl-nucleotide
  modified_base 18: mod_base = OTHER; note = 2'fluoro-nucleotide phosphorothioate
  modified_base 19: mod_base = OTHER; note = 2'O-methyl-nucleotide phosphorothioate
  modified_base 20: mod_base = OTHER; note = 2'O-methyl-nucleotide
nagtctacaaaccagttgaa

SEQ ID NO: 408 - RNA, 21 nt, synthetic construct
  source 1..21: mol_type = other RNA
  modified_base 1: mod_base = OTHER; note = Vinyl phosphonate 2'O-methyl-nucleotide phosphorothioate
  modified_base 2: mod_base = OTHER; note = 2'fluoro-nucleotide phosphorothioate
  modified_base 3: mod_base = OTHER; note = 2'O-methyl-nucleotide
  modified_base 4: mod_base = OTHER; note = 2'O-methyl-nucleotide
  modified_base 5: mod_base = OTHER; note = 2'O-methyl-nucleotide
  modified_base 6: mod_base = OTHER; note = 2'fluoro-nucleotide
  modified_base 7: mod_base = OTHER; note = Unlocked nucleotide
  modified_base 8: mod_base = OTHER; note = 2'O-methyl-nucleotide
  modified_base 9: mod_base = OTHER; note = 2'O-methyl-nucleotide
  modified_base 10: mod_base = OTHER; note = 2'O-methyl-nucleotide
  modified_base 11: mod_base = OTHER; note = 2'O-methyl-nucleotide
  modified_base 12: mod_base = OTHER; note = 2'O-methyl-nucleotide
  modified_base 13: mod_base = OTHER; note = 2'O-methyl-nucleotide
  modified_base 14: mod_base = OTHER; note = 2'fluoro-nucleotide
  modified_base 15: mod_base = OTHER; note = 2'O-methyl-nucleotide
  modified_base 16: mod_base = OTHER; note = 2'fluoro-nucleotide
  modified_base 17: mod_base = OTHER; note = 2'O-methyl-nucleotide
  modified_base 18: mod_base = OTHER; note = 2'O-methyl-nucleotide
  modified_base 19: mod_base = OTHER; note = 2'O-methyl-nucleotide phosphorothioate
  modified_base 20: mod_base = OTHER; note = 2'O-methyl-nucleotide phosphorothioate
  modified_base 21: mod_base = OTHER; note = 2'O-methyl-nucleotide
ttcaactggtttgtagactat

SEQ ID NO: 409 - RNA, 20 nt, synthetic construct
  source 1..20: mol_type = other RNA
  modified_base 1: mod_base = OTHER; note = Inverted abasic nucleotide phosphorothioate
  modified_base 2: mod_base = OTHER; note = 2'O-methyl-nucleotide phosphorothioate
  modified_base 3: mod_base = OTHER; note = 2'O-methyl-nucleotide
  modified_base 4: mod_base = OTHER; note = 2'fluoro-nucleotide
  modified_base 5: mod_base = OTHER; note = 2'O-methyl-nucleotide
  modified_base 6: mod_base = OTHER; note = 2'O-methyl-nucleotide
  modified_base 7: mod_base = OTHER; note = 2'O-methyl-nucleotide
  modified_base 8: mod_base = OTHER; note = 2'fluoro-nucleotide
  modified_base 9: mod_base = OTHER; note = 2'fluoro-nucleotide
  modified_base 10: mod_base = OTHER; note = 2'fluoro-nucleotide
  modified_base 11: mod_base = OTHER; note = 2'O-methyl-nucleotide
  modified_base 12: mod_base = OTHER; note = 2'O-methyl-nucleotide
  modified_base 13: mod_base = OTHER; note = 2'fluoro-nucleotide
  modified_base 14: mod_base = OTHER; note = 2'O-methyl-nucleotide
  modified_base 15: mod_base = OTHER; note = 2'O-methyl-nucleotide
  modified_base 16: mod_base = OTHER; note = 2'O-methyl-nucleotide
  modified_base 17: mod_base = OTHER; note = 2'O-methyl-nucleotide
  modified_base 18: mod_base = OTHER; note = 2'fluoro-nucleotide phosphorothioate
  modified_base 19: mod_base = OTHER; note = 2'O-methyl-nucleotide phosphorothioate
  modified_base 20: mod_base = OTHER; note = 2'O-methyl-nucleotide
nagtctacaaaccagttgaa

SEQ ID NO: 410 - RNA, 21 nt, synthetic construct
  source 1..21: mol_type = other RNA
  modified_base 1: mod_base = OTHER; note = Vinyl phosphonate 2'O-methyl-nucleotide phosphorothioate
  modified_base 2: mod_base = OTHER; note = 2'fluoro-nucleotide phosphorothioate
  modified_base 3: mod_base = OTHER; note = 2'O-methyl-nucleotide phosphorothioate
  modified_base 4: mod_base = OTHER; note = 2'O-methyl-nucleotide
  modified_base 5: mod_base = OTHER; note = 2'O-methyl-nucleotide
  modified_base 6: mod_base = OTHER; note = 2'fluoro-nucleotide
  modified_base 7: mod_base = OTHER; note = Unlocked nucleotide
  modified_base 8: mod_base = OTHER; note = 2'O-methyl-nucleotide
  modified_base 9: mod_base = OTHER; note = 2'O-methyl-nucleotide
  modified_base 10: mod_base = OTHER; note = 2'O-methyl-nucleotide
  modified_base 11: mod_base = OTHER; note = 2'O-methyl-nucleotide
  modified_base 12: mod_base = OTHER; note = 2'O-methyl-nucleotide
  modified_base 13: mod_base = OTHER; note = 2'O-methyl-nucleotide
  modified_base 14: mod_base = OTHER; note = 2'fluoro-nucleotide
  modified_base 15: mod_base = OTHER; note = 2'O-methyl-nucleotide
  modified_base 16: mod_base = OTHER; note = 2'fluoro-nucleotide
  modified_base 17: mod_base = OTHER; note = 2'O-methyl-nucleotide
  modified_base 18: mod_base = OTHER; note = 2'O-methyl-nucleotide
  modified_base 19: mod_base = OTHER; note = 2'O-methyl-nucleotide
  modified_base 20: mod_base = OTHER; note = 2'O-methyl-nucleotide phosphorothioate
  modified_base 21: mod_base = OTHER; note = 2'O-methyl-nucleotide
ttcaactggtttgtagactat

SEQ ID NO: 411 - RNA, 21 nt, synthetic construct
  source 1..21: mol_type = other RNA
  modified_base 1: mod_base = OTHER; note = Inverted abasic nucleotide phosphorothioate
  modified_base 2: mod_base = OTHER; note = 2'O-methyl-nucleotide phosphorothioate
  modified_base 3: mod_base = OTHER; note = 2'O-methyl-nucleotide
  modified_base 4: mod_base = OTHER; note = 2'O-methyl-nucleotide
  modified_base 5: mod_base = OTHER; note = 2'O-methyl-nucleotide
  modified_base 6: mod_base = OTHER; note = 2'O-methyl-nucleotide
  modified_base 7: mod_base = OTHER; note = 2'O-methyl-nucleotide
  modified_base 8: mod_base = OTHER; note = 2'fluoro-nucleotide
  modified_base 9: mod_base = OTHER; note = 2'fluoro-nucleotide
  modified_base 10: mod_base = OTHER; note = 2'fluoro-nucleotide
  modified_base 11: mod_base = OTHER; note = 2'O-methyl-nucleotide
  modified_base 12: mod_base = OTHER; note = 2'O-methyl-nucleotide
  modified_base 13: mod_base = OTHER; note = 2'O-methyl-nucleotide
  modified_base 14: mod_base = OTHER; note = 2'O-methyl-nucleotide
  modified_base 15: mod_base = OTHER; note = 2'O-methyl-nucleotide
  modified_base 16: mod_base = OTHER; note = 2'O-methyl-nucleotide
  modified_base 17: mod_base = OTHER; note = 2'O-methyl-nucleotide
  modified_base 18: mod_base = OTHER; note = 2'O-methyl-nucleotide
  modified_base 19: mod_base = OTHER; note = 2'O-methyl-nucleotide phosphorothioate
  modified_base 20: mod_base = OTHER; note = 2'O-methyl-nucleotide phosphorothioate
  modified_base 21: mod_base = OTHER; note = Inverted abasic nucleotide
nagtctacaaaccagttgaan

SEQ ID NO: 412 - RNA, 21 nt, synthetic construct
  source 1..21: mol_type = other RNA
  modified_base 1: mod_base = OTHER; note = Vinyl phosphonate 2'O-methyl-nucleotide phosphorothioate
  modified_base 2: mod_base = OTHER; note = 2'fluoro-nucleotide phosphorothioate
  modified_base 3: mod_base = OTHER; note = 2'O-methyl-nucleotide
  modified_base 4: mod_base = OTHER; note = 2'O-methyl-nucleotide
  modified_base 5: mod_base = OTHER; note = 2'O-methyl-nucleotide
  modified_base 6: mod_base = OTHER; note = 2'fluoro-nucleotide
  modified_base 7: mod_base = OTHER; note = 2'O-methyl-nucleotide
  modified_base 8: mod_base = OTHER; note = 2'O-methyl-nucleotide
  modified_base 9: mod_base = OTHER; note = 2'fluoro-nucleotide
  modified_base 10: mod_base = OTHER; note = 2'O-methyl-nucleotide
  modified_base 11: mod_base = OTHER; note = 2'O-methyl-nucleotide
  modified_base 12: mod_base = OTHER; note = 2'O-methyl-nucleotide
  modified_base 13: mod_base = OTHER; note = 2'O-methyl-nucleotide
  modified_base 14: mod_base = OTHER; note = 2'fluoro-nucleotide
  modified_base 15: mod_base = OTHER; note = 2'O-methyl-nucleotide
  modified_base 16: mod_base = OTHER; note = 2'fluoro-nucleotide
  modified_base 17: mod_base = OTHER; note = 2'O-methyl-nucleotide
  modified_base 18: mod_base = OTHER; note = 2'O-methyl-nucleotide
  modified_base 19: mod_base = OTHER; note = 2'O-methyl-nucleotide phosphorothioate
  modified_base 20: mod_base = OTHER; note = 2'O-methyl-nucleotide phosphorothioate
  modified_base 21: mod_base = OTHER; note = 2'O-methyl-nucleotide
ttcaactggtttgtagactat

SEQ ID NO: 413 - RNA, 23 nt, synthetic construct
  source 1..23: mol_type = other RNA
  modified_base 1: mod_base = OTHER; note = Inverted abasic nucleotide phosphorothioate
  modified_base 2: mod_base = OTHER; note = 2'O-methyl-nucleotide phosphorothioate
  modified_base 3: mod_base = OTHER; note = 2'O-methyl-nucleotide
  modified_base 4: mod_base = OTHER; note = 2'O-methyl-nucleotide
  modified_base 5: mod_base = OTHER; note = 2'O-methyl-nucleotide
  modified_base 6: mod_base = OTHER; note = 2'O-methyl-nucleotide
  modified_base 7: mod_base = OTHER; note = 2'O-methyl-nucleotide
  modified_base 8: mod_base = OTHER; note = 2'O-methyl-nucleotide
  modified_base 9: mod_base = OTHER; note = 2'O-methyl-nucleotide
  modified_base 10: mod_base = OTHER; note = 2'fluoro-nucleotide
  modified_base 11: mod_base = OTHER; note = 2'fluoro-nucleotide
  modified_base 12: mod_base = OTHER; note = 2'fluoro-nucleotide
  modified_base 13: mod_base = OTHER; note = 2'O-methyl-nucleotide
  modified_base 14: mod_base = OTHER; note = 2'O-methyl-nucleotide
  modified_base 15: mod_base = OTHER; note = 2'O-methyl-nucleotide
  modified_base 16: mod_base = OTHER; note = 2'O-methyl-nucleotide
  modified_base 17: mod_base = OTHER; note = 2'O-methyl-nucleotide
  modified_base 18: mod_base = OTHER; note = 2'O-methyl-nucleotide
  modified_base 19: mod_base = OTHER; note = 2'O-methyl-nucleotide
  modified_base 20: mod_base = OTHER; note = 2'O-methyl-nucleotide
  modified_base 21: mod_base = OTHER; note = 2'O-methyl-nucleotide phosphorothioate
  modified_base 22: mod_base = OTHER; note = 2'O-methyl-nucleotide phosphorothioate
  modified_base 23: mod_base = OTHER; note = Inverted abasic nucleotide
natagtctacaaaccagttgaan

SEQ ID NO: 414 - RNA, 21 nt, synthetic construct
  source 1..21: mol_type = other RNA
  modified_base 1: mod_base = OTHER; note = Vinyl phosphonate 2'O-methyl-nucleotide phosphorothioate
  modified_base 2: mod_base = OTHER; note = 2'fluoro-nucleotide phosphorothioate
  modified_base 3: mod_base = OTHER; note = 2'O-methyl-nucleotide
  modified_base 4: mod_base = OTHER; note = 2'O-methyl-nucleotide
  modified_base 5: mod_base = OTHER; note = 2'O-methyl-nucleotide
  modified_base 6: mod_base = OTHER; note = 2'O-methyl-nucleotide
  modified_base 7: mod_base = OTHER; note = Unlocked nucleotide
  modified_base 8: mod_base = OTHER; note = 2'O-methyl-nucleotide
  modified_base 9: mod_base = OTHER; note = 2'O-methyl-nucleotide
  modified_base 10: mod_base = OTHER; note = 2'O-methyl-nucleotide
  modified_base 11: mod_base = OTHER; note = 2'O-methyl-nucleotide
  modified_base 12: mod_base = OTHER; note = 2'O-methyl-nucleotide
  modified_base 13: mod_base = OTHER; note = 2'O-methyl-nucleotide
  modified_base 14: mod_base = OTHER; note = 2'fluoro-nucleotide
  modified_base 15: mod_base = OTHER; note = 2'O-methyl-nucleotide
  modified_base 16: mod_base = OTHER; note = 2'fluoro-nucleotide
  modified_base 17: mod_base = OTHER; note = 2'O-methyl-nucleotide
  modified_base 18: mod_base = OTHER; note = 2'O-methyl-nucleotide
  modified_base 19: mod_base = OTHER; note = 2'O-methyl-nucleotide phosphorothioate
  modified_base 20: mod_base = OTHER; note = 2'O-methyl-nucleotide phosphorothioate
  modified_base 21: mod_base = OTHER; note = 2'O-methyl-nucleotide
ttcaactggtttgtagactat

SEQ ID NO: 415 - RNA, 23 nt, synthetic construct
  source 1..23: mol_type = other RNA
  modified_base 1: mod_base = OTHER; note = Inverted abasic nucleotide phosphorothioate
  modified_base 2: mod_base = OTHER; note = 2'O-methyl-nucleotide phosphorothioate
  modified_base 3: mod_base = OTHER; note = 2'O-methyl-nucleotide
  modified_base 4: mod_base = OTHER; note = 2'O-methyl-nucleotide
  modified_base 5: mod_base = OTHER; note = 2'O-methyl-nucleotide
  modified_base 6: mod_base = OTHER; note = 2'O-methyl-nucleotide
  modified_base 7: mod_base = OTHER; note = 2'O-methyl-nucleotide
  modified_base 8: mod_base = OTHER; note = 2'O-methyl-nucleotide
  modified_base 9: mod_base = OTHER; note = 2'O-methyl-nucleotide
  modified_base 10: mod_base = OTHER; note = 2'fluoro-nucleotide
  modified_base 11: mod_base = OTHER; note = 2'fluoro-nucleotide
  modified_base 12: mod_base = OTHER; note = 2'fluoro-nucleotide
  modified_base 13: mod_base = OTHER; note = 2'O-methyl-nucleotide
  modified_base 14: mod_base = OTHER; note = 2'O-methyl-nucleotide
  modified_base 15: mod_base = OTHER; note = 2'O-methyl-nucleotide
  modified_base 16: mod_base = OTHER; note = 2'O-methyl-nucleotide
  modified_base 17: mod_base = OTHER; note = 2'O-methyl-nucleotide
  modified_base 18: mod_base = OTHER; note = 2'O-methyl-nucleotide
  modified_base 19: mod_base = OTHER; note = 2'O-methyl-nucleotide
  modified_base 20: mod_base = OTHER; note = 2'O-methyl-nucleotide
  modified_base 21: mod_base = OTHER; note = 2'O-methyl-nucleotide phosphorothioate
  modified_base 22: mod_base = OTHER; note = 2'O-methyl-nucleotide phosphorothioate
  modified_base 23: mod_base = OTHER; note = Inverted abasic nucleotide
natagtctacaaaccagttgaan

SEQ ID NO: 416 - RNA, 21 nt, synthetic construct
  source 1..21: mol_type = other RNA
  modified_base 1: mod_base = OTHER; note = Vinyl phosphonate 2'O-methyl-nucleotide phosphorothioate
  modified_base 2: mod_base = OTHER; note = 2'fluoro-nucleotide phosphorothioate
  modified_base 3: mod_base = OTHER; note = 2'O-methyl-nucleotide
  modified_base 4: mod_base = OTHER; note = 2'O-methyl-nucleotide
  modified_base 5: mod_base = OTHER; note = 2'O-methyl-nucleotide
  modified_base 6: mod_base = OTHER; note = 2'fluoro-nucleotide
  modified_base 7: mod_base = OTHER; note = Unlocked nucleotide
  modified_base 8: mod_base = OTHER; note = 2'O-methyl-nucleotide
  modified_base 9: mod_base = OTHER; note = 2'O-methyl-nucleotide
  modified_base 10: mod_base = OTHER; note = 2'O-methyl-nucleotide
  modified_base 11: mod_base = OTHER; note = 2'O-methyl-nucleotide
  modified_base 12: mod_base = OTHER; note = 2'O-methyl-nucleotide
  modified_base 13: mod_base = OTHER; note = 2'O-methyl-nucleotide
  modified_base 14: mod_base = OTHER; note = 2'fluoro-nucleotide
  modified_base 15: mod_base = OTHER; note = 2'O-methyl-nucleotide
  modified_base 16: mod_base = OTHER; note = 2'fluoro-nucleotide
  modified_base 17: mod_base = OTHER; note = 2'O-methyl-nucleotide
  modified_base 18: mod_base = OTHER; note = 2'O-methyl-nucleotide
  modified_base 19: mod_base = OTHER; note = 2'O-methyl-nucleotide phosphorothioate
  modified_base 20: mod_base = OTHER; note = 2'O-methyl-nucleotide phosphorothioate
  modified_base 21: mod_base = OTHER; note = 2'O-methyl-nucleotide
ttcaactggtttgtagactat

SEQ ID NO: 417 - RNA, 23 nt, synthetic construct
  source 1..23: mol_type = other RNA
  modified_base 1: mod_base = OTHER; note = Inverted abasic nucleotide phosphorothioate
  modified_base 2: mod_base = OTHER; note = 2'O-methyl-nucleotide phosphorothioate
  modified_base 3: mod_base = OTHER; note = 2'O-methyl-nucleotide
  modified_base 4: mod_base = OTHER; note = 2'O-methyl-nucleotide
  modified_base 5: mod_base = OTHER; note = 2'O-methyl-nucleotide
  modified_base 6: mod_base = OTHER; note = 2'O-methyl-nucleotide
  modified_base 7: mod_base = OTHER; note = 2'O-methyl-nucleotide
  modified_base 8: mod_base = OTHER; note = 2'O-methyl-nucleotide
  modified_base 9: mod_base = OTHER; note = 2'O-methyl-nucleotide
  modified_base 10: mod_base = OTHER; note = 2'fluoro-nucleotide
  modified_base 11: mod_base = OTHER; note = 2'fluoro-nucleotide
  modified_base 12: mod_base = OTHER; note = 2'fluoro-nucleotide
  modified_base 13: mod_base = OTHER; note = 2'O-methyl-nucleotide
  modified_base 14: mod_base = OTHER; note = 2'O-methyl-nucleotide
  modified_base 15: mod_base = OTHER; note = 2'O-methyl-nucleotide
  modified_base 16: mod_base = OTHER; note = 2'O-methyl-nucleotide
  modified_base 17: mod_base = OTHER; note = 2'O-methyl-nucleotide
  modified_base 18: mod_base = OTHER; note = 2'O-methyl-nucleotide
  modified_base 19: mod_base = OTHER; note = 2'O-methyl-nucleotide
  modified_base 20: mod_base = OTHER; note = 2'O-methyl-nucleotide
  modified_base 21: mod_base = OTHER; note = 2'O-methyl-nucleotide phosphorothioate
  modified_base 22: mod_base = OTHER; note = 2'O-methyl-nucleotide phosphorothioate
  modified_base 23: mod_base = OTHER; note = Inverted abasic nucleotide
natagtctacaaaccagttgaan

SEQ ID NO: 418 - RNA, 21 nt, synthetic construct
  source 1..21: mol_type = other RNA
  modified_base 1: mod_base = OTHER; note = Vinyl phosphonate 2'O-methyl-nucleotide phosphorothioate
  modified_base 2: mod_base = OTHER; note = 2'fluoro-nucleotide phosphorothioate
  modified_base 3: mod_base = OTHER; note = 2'O-methyl-nucleotide
  modified_base 4: mod_base = OTHER; note = 2'O-methyl-nucleotide
  modified_base 5: mod_base = OTHER; note = 2'O-methyl-nucleotide
  modified_base 6: mod_base = OTHER; note = 2'O-methyl-nucleotide
  modified_base 7: mod_base = OTHER; note = Unlocked nucleotide
  modified_base 8: mod_base = OTHER; note = 2'fluoro-nucleotide
  modified_base 9: mod_base = OTHER; note = 2'O-methyl-nucleotide
  modified_base 10: mod_base = OTHER; note = 2'O-methyl-nucleotide
  modified_base 11: mod_base = OTHER; note = 2'O-methyl-nucleotide
  modified_base 12: mod_base = OTHER; note = 2'O-methyl-nucleotide
  modified_base 13: mod_base = OTHER; note = 2'O-methyl-nucleotide
  modified_base 14: mod_base = OTHER; note = 2'fluoro-nucleotide
  modified_base 15: mod_base = OTHER; note = 2'O-methyl-nucleotide
  modified_base 16: mod_base = OTHER; note = 2'fluoro-nucleotide
  modified_base 17: mod_base = OTHER; note = 2'O-methyl-nucleotide
  modified_base 18: mod_base = OTHER; note = 2'O-methyl-nucleotide
  modified_base 19: mod_base = OTHER; note = 2'O-methyl-nucleotide phosphorothioate
  modified_base 20: mod_base = OTHER; note = 2'O-methyl-nucleotide phosphorothioate
  modified_base 21: mod_base = OTHER; note = 2'O-methyl-nucleotide
ttcaactggtttgtagactat

SEQ ID NO: 419 - RNA, 23 nt, synthetic construct
  source 1..23: mol_type = other RNA
  modified_base 1: mod_base = OTHER; note = Inverted abasic nucleotide phosphorothioate
  modified_base 2: mod_base = OTHER; note = 2'O-methyl-nucleotide phosphorothioate
  modified_base 3: mod_base = OTHER; note = 2'O-methyl-nucleotide
  modified_base 4: mod_base = OTHER; note = 2'O-methyl-nucleotide
  modified_base 5: mod_base = OTHER; note = 2'O-methyl-nucleotide
  modified_base 6: mod_base = OTHER; note = 2'O-methyl-nucleotide
  modified_base 7: mod_base = OTHER; note = 2'O-methyl-nucleotide
  modified_base 8: mod_base = OTHER; note = 2'O-methyl-nucleotide
  modified_base 9: mod_base = OTHER; note = 2'O-methyl-nucleotide
  modified_base 10: mod_base = OTHER; note = 2'fluoro-nucleotide
  modified_base 11: mod_base = OTHER; note = 2'fluoro-nucleotide
  modified_base 12: mod_base = OTHER; note = 2'fluoro-nucleotide
  modified_base 13: mod_base = OTHER; note = 2'O-methyl-nucleotide
  modified_base 14: mod_base = OTHER; note = 2'O-methyl-nucleotide
  modified_base 15: mod_base = OTHER; note = 2'O-methyl-nucleotide
  modified_base 16: mod_base = OTHER; note = 2'O-methyl-nucleotide
  modified_base 17: mod_base = OTHER; note = 2'O-methyl-nucleotide
  modified_base 18: mod_base = OTHER; note = 2'O-methyl-nucleotide
  modified_base 19: mod_base = OTHER; note = 2'O-methyl-nucleotide
  modified_base 20: mod_base = OTHER; note = 2'O-methyl-nucleotide
  modified_base 21: mod_base = OTHER; note = 2'O-methyl-nucleotide phosphorothioate
  modified_base 22: mod_base = OTHER; note = 2'O-methyl-nucleotide phosphorothioate
  modified_base 23: mod_base = OTHER; note = Inverted abasic nucleotide
natagtctacaaaccagttgaan

SEQ ID NO: 420 - RNA, 21 nt, synthetic construct
  source 1..21: mol_type = other RNA
  modified_base 1: mod_base = OTHER; note = Vinyl phosphonate 2'O-methyl-nucleotide phosphorothioate
  modified_base 2: mod_base = OTHER; note = 2'fluoro-nucleotide phosphorothioate
  modified_base 3: mod_base = OTHER; note = 2'O-methyl-nucleotide
  modified_base 4: mod_base = OTHER; note = 2'O-methyl-nucleotide
  modified_base 5: mod_base = OTHER; note = 2'O-methyl-nucleotide
  modified_base 6: mod_base = OTHER; note = 2'O-methyl-nucleotide
  modified_base 7: mod_base = OTHER; note = Unlocked nucleotide
  modified_base 8: mod_base = OTHER; note = 2'O-methyl-nucleotide
  modified_base 9: mod_base = OTHER; note = 2'fluoro-nucleotide
  modified_base 10: mod_base = OTHER; note = 2'O-methyl-nucleotide
  modified_base 11: mod_base = OTHER; note = 2'O-methyl-nucleotide
  modified_base 12: mod_base = OTHER; note = 2'O-methyl-nucleotide
  modified_base 13: mod_base = OTHER; note = 2'O-methyl-nucleotide
  modified_base 14: mod_base = OTHER; note = 2'fluoro-nucleotide
  modified_base 15: mod_base = OTHER; note = 2'O-methyl-nucleotide
  modified_base 16: mod_base = OTHER; note = 2'fluoro-nucleotide
  modified_base 17: mod_base = OTHER; note = 2'O-methyl-nucleotide
  modified_base 18: mod_base = OTHER; note = 2'O-methyl-nucleotide
  modified_base 19: mod_base = OTHER; note = 2'O-methyl-nucleotide phosphorothioate
  modified_base 20: mod_base = OTHER; note = 2'O-methyl-nucleotide phosphorothioate
  modified_base 21: mod_base = OTHER; note = 2'O-methyl-nucleotide
ttcaactggtttgtagactat

SEQ ID NO: 421 - RNA, 23 nt, synthetic construct
  source 1..23: mol_type = other RNA
  modified_base 1: mod_base = OTHER; note = Inverted abasic nucleotide phosphorothioate
  modified_base 2: mod_base = OTHER; note = 2'O-methyl-nucleotide phosphorothioate
  modified_base 3: mod_base = OTHER; note = 2'O-methyl-nucleotide
  modified_base 4: mod_base = OTHER; note = 2'O-methyl-nucleotide
  modified_base 5: mod_base = OTHER; note = 2'O-methyl-nucleotide
  modified_base 6: mod_base = OTHER; note = 2'O-methyl-nucleotide
  modified_base 7: mod_base = OTHER; note = 2'O-methyl-nucleotide
  modified_base 8: mod_base = OTHER; note = 2'O-methyl-nucleotide
  modified_base 9: mod_base = OTHER; note = 2'O-methyl-nucleotide
  modified_base 10: mod_base = OTHER; note = 2'fluoro-nucleotide
  modified_base 11: mod_base = OTHER; note = 2'fluoro-nucleotide
  modified_base 12: mod_base = OTHER; note = 2'fluoro-nucleotide
  modified_base 13: mod_base = OTHER; note = 2'O-methyl-nucleotide
  modified_base 14: mod_base = OTHER; note = 2'O-methyl-nucleotide
  modified_base 15: mod_base = OTHER; note = 2'O-methyl-nucleotide
  modified_base 16: mod_base = OTHER; note = 2'O-methyl-nucleotide
  modified_base 17: mod_base = OTHER; note = 2'O-methyl-nucleotide
  modified_base 18: mod_base = OTHER; note = 2'O-methyl-nucleotide
  modified_base 19: mod_base = OTHER; note = 2'O-methyl-nucleotide
  modified_base 20: mod_base = OTHER; note = 2'O-methyl-nucleotide
  modified_base 21: mod_base = OTHER; note = 2'O-methyl-nucleotide phosphorothioate
  modified_base 22: mod_base = OTHER; note = 2'O-methyl-nucleotide phosphorothioate
  modified_base 23: mod_base = OTHER; note = Inverted abasic nucleotide
natagtctacaaaccagttgaan

SEQ ID NO: 422 - RNA, 21 nt, synthetic construct
  source 1..21: mol_type = other RNA
  modified_base 1: mod_base = OTHER; note = Vinyl phosphonate 2'O-methyl-nucleotide phosphorothioate
  modified_base 2: mod_base = OTHER; note = 2'fluoro-nucleotide phosphorothioate
  modified_base 3: mod_base = OTHER; note = 2'O-methyl-nucleotide
  modified_base 4: mod_base = OTHER; note = 2'O-methyl-nucleotide
  modified_base 5: mod_base = OTHER; note = 2'O-methyl-nucleotide
  modified_base 6: mod_base = OTHER; note = 2'fluoro-nucleotide
  modified_base 7: mod_base = OTHER; note = Unlocked nucleotide
  modified_base 8: mod_base = OTHER; note = 2'O-methyl-nucleotide
  modified_base 9: mod_base = OTHER; note = 2'fluoro-nucleotide
  modified_base 10: mod_base = OTHER; note = 2'O-methyl-nucleotide
  modified_base 11: mod_base = OTHER; note = 2'O-methyl-nucleotide
  modified_base 12: mod_base = OTHER; note = 2'O-methyl-nucleotide
  modified_base 13: mod_base = OTHER; note = 2'O-methyl-nucleotide
  modified_base 14: mod_base = OTHER; note = 2'fluoro-nucleotide
  modified_base 15: mod_base = OTHER; note = 2'O-methyl-nucleotide
  modified_base 16: mod_base = OTHER; note = 2'fluoro-nucleotide
  modified_base 17: mod_base = OTHER; note = 2'O-methyl-nucleotide
  modified_base 18: mod_base = OTHER; note = 2'O-methyl-nucleotide
  modified_base 19: mod_base = OTHER; note = 2'O-methyl-nucleotide phosphorothioate
  modified_base 20: mod_base = OTHER; note = 2'O-methyl-nucleotide phosphorothioate
  modified_base 21: mod_base = OTHER; note = 2'O-methyl-nucleotide
ttcaactggtttgtagactat

SEQ ID NO: 423 - RNA, 23 nt, synthetic construct
  source 1..23: mol_type = other RNA
  modified_base 1: mod_base = OTHER; note = Inverted abasic nucleotide phosphorothioate
  modified_base 2: mod_base = OTHER; note = 2'O-methyl-nucleotide phosphorothioate
  modified_base 3: mod_base = OTHER; note = 2'O-methyl-nucleotide
  modified_base 4: mod_base = OTHER; note = 2'O-methyl-nucleotide
  modified_base 5: mod_base = OTHER; note = 2'O-methyl-nucleotide
  modified_base 6: mod_base = OTHER; note = 2'O-methyl-nucleotide
  modified_base 7: mod_base = OTHER; note = 2'O-methyl-nucleotide
  modified_base 8: mod_base = OTHER; note = 2'O-methyl-nucleotide
  modified_base 9: mod_base = OTHER; note = 2'O-methyl-nucleotide
  modified_base 10: mod_base = OTHER; note = 2'fluoro-nucleotide
  modified_base 11: mod_base = OTHER; note = 2'fluoro-nucleotide
  modified_base 12: mod_base = OTHER; note = 2'fluoro-nucleotide
  modified_base 13: mod_base = OTHER; note = 2'O-methyl-nucleotide
  modified_base 14: mod_base = OTHER; note = 2'O-methyl-nucleotide
  modified_base 15: mod_base = OTHER; note = 2'O-methyl-nucleotide
  modified_base 16: mod_base = OTHER; note = 2'O-methyl-nucleotide
  modified_base 17: mod_base = OTHER; note = 2'O-methyl-nucleotide
  modified_base 18: mod_base = OTHER; note = 2'O-methyl-nucleotide
  modified_base 19: mod_base = OTHER; note = 2'O-methyl-nucleotide
  modified_base 20: mod_base = OTHER; note = 2'O-methyl-nucleotide
  modified_base 21: mod_base = OTHER; note = 2'O-methyl-nucleotide phosphorothioate
  modified_base 22: mod_base = OTHER; note = 2'O-methyl-nucleotide phosphorothioate
  modified_base 23: mod_base = OTHER; note = Inverted abasic nucleotide
natagtctacaaaccagttgaan

SEQ ID NO: 424 - RNA, 21 nt, synthetic construct
  source 1..21: mol_type = other RNA
  modified_base 1: mod_base = OTHER; note = Vinyl phosphonate 2'O-methyl-nucleotide phosphorothioate
  modified_base 2: mod_base = OTHER; note = 2'fluoro-nucleotide phosphorothioate
  modified_base 3: mod_base = OTHER; note = 2'O-methyl-nucleotide
  modified_base 4: mod_base = OTHER; note = 2'O-methyl-nucleotide
  modified_base 5: mod_base = OTHER; note = 2'O-methyl-nucleotide
  modified_base 6: mod_base = OTHER; note = 2'O-methyl-nucleotide
  modified_base 7: mod_base = OTHER; note = Glycol thymidine
  modified_base 8: mod_base = OTHER; note = 2'O-methyl-nucleotide
  modified_base 9: mod_base = OTHER; note = 2'O-methyl-nucleotide
  modified_base 10: mod_base = OTHER; note = 2'O-methyl-nucleotide
  modified_base 11: mod_base = OTHER; note = 2'O-methyl-nucleotide
  modified_base 12: mod_base = OTHER; note = 2'O-methyl-nucleotide
  modified_base 13: mod_base = OTHER; note = 2'O-methyl-nucleotide
  modified_base 14: mod_base = OTHER; note = 2'fluoro-nucleotide
  modified_base 15: mod_base = OTHER; note = 2'O-methyl-nucleotide
  modified_base 16: mod_base = OTHER; note = 2'fluoro-nucleotide
  modified_base 17: mod_base = OTHER; note = 2'O-methyl-nucleotide
  modified_base 18: mod_base = OTHER; note = 2'O-methyl-nucleotide
  modified_base 19: mod_base = OTHER; note = 2'O-methyl-nucleotide phosphorothioate
  modified_base 20: mod_base = OTHER; note = 2'O-methyl-nucleotide phosphorothioate
  modified_base 21: mod_base = OTHER; note = 2'O-methyl-nucleotide
ttcaactggtttgtagactat

SEQ ID NO: 425 - RNA, 23 nt, synthetic construct
  source 1..23: mol_type = other RNA
  modified_base 1: mod_base = OTHER; note = Inverted abasic nucleotide phosphorothioate
  modified_base 2: mod_base = OTHER; note = 2'O-methyl-nucleotide phosphorothioate
  modified_base 3: mod_base = OTHER; note = 2'O-methyl-nucleotide
  modified_base 4: mod_base = OTHER; note = 2'O-methyl-nucleotide
  modified_base 5: mod_base = OTHER; note = 2'O-methyl-nucleotide
  modified_base 6: mod_base = OTHER; note = 2'O-methyl-nucleotide
  modified_base 7: mod_base = OTHER; note = 2'O-methyl-nucleotide
  modified_base 8: mod_base = OTHER; note = 2'O-methyl-nucleotide
  modified_base 9: mod_base = OTHER; note = 2'O-methyl-nucleotide
  modified_base 10: mod_base = OTHER; note = 2'fluoro-nucleotide
  modified_base 11: mod_base = OTHER; note = 2'fluoro-nucleotide
  modified_base 12: mod_base = OTHER; note = 2'fluoro-nucleotide
  modified_base 13: mod_base = OTHER; note = 2'O-methyl-nucleotide
  modified_base 14: mod_base = OTHER; note = 2'O-methyl-nucleotide
  modified_base 15: mod_base = OTHER; note = 2'O-methyl-nucleotide
  modified_base 16: mod_base = OTHER; note = 2'O-methyl-nucleotide
  modified_base 17: mod_base = OTHER; note = 2'O-methyl-nucleotide
  modified_base 18: mod_base = OTHER; note = 2'O-methyl-nucleotide
  modified_base 19: mod_base = OTHER; note = 2'O-methyl-nucleotide
  modified_base 20: mod_base = OTHER; note = 2'O-methyl-nucleotide
  modified_base 21: mod_base = OTHER; note = 2'O-methyl-nucleotide phosphorothioate
  modified_base 22: mod_base = OTHER; note = 2'O-methyl-nucleotide phosphorothioate
  modified_base 23: mod_base = OTHER; note = Inverted abasic nucleotide
natagtctacaaaccagttgaan

SEQ ID NO: 426 - DNA, 21 bp, synthetic construct
  source 1..21: mol_type = other DNA
  modified_base 1: mod_base = OTHER; note = Vinyl phosphonate 2'O-methyl-nucleotide phosphorothioate
  modified_base 2: mod_base = OTHER; note = 2'fluoro-nucleotide phosphorothioate
  modified_base 3: mod_base = OTHER; note = 2'O-methyl-nucleotide
  modified_base 4: mod_base = OTHER; note = 2'O-methyl-nucleotide
  modified_base 5: mod_base = OTHER; note = 2'O-methyl-nucleotide
  modified_base 6: mod_base = OTHER; note = 2'O-methyl-nucleotide
  modified_base 8: mod_base = OTHER; note = 2'O-methyl-nucleotide
  modified_base 9: mod_base = OTHER; note = 2'O-methyl-nucleotide
  modified_base 10: mod_base = OTHER; note = 2'O-methyl-nucleotide
  modified_base 11: mod_base = OTHER; note = 2'O-methyl-nucleotide
  modified_base 12: mod_base = OTHER; note = 2'O-methyl-nucleotide
  modified_base 13: mod_base = OTHER; note = 2'O-methyl-nucleotide
  modified_base 14: mod_base = OTHER; note = 2'fluoro-nucleotide
  modified_base 15: mod_base = OTHER; note = 2'O-methyl-nucleotide
  modified_base 16: mod_base = OTHER; note = 2'fluoro-nucleotide
  modified_base 17: mod_base = OTHER; note = 2'O-methyl-nucleotide
  modified_base 18: mod_base = OTHER; note = 2'O-methyl-nucleotide
  modified_base 19: mod_base = OTHER; note = 2'O-methyl-nucleotide phosphorothioate
  modified_base 20: mod_base = OTHER; note = 2'O-methyl-nucleotide phosphorothioate
  modified_base 21: mod_base = OTHER; note = 2'O-methyl-nucleotide
  misc_feature 1..6: note = RNA
  misc_feature 7: note = DNA
  misc_feature 8..21: note = RNA
ttcaactggtttgtagactat

SEQ ID NO: 427 - RNA, 23 nt, synthetic construct
  source 1..23: mol_type = other RNA
  modified_base 1: mod_base = OTHER; note = Inverted abasic nucleotide phosphorothioate
  modified_base 2: mod_base = OTHER; note = 2'O-methyl-nucleotide phosphorothioate
  modified_base 3: mod_base = OTHER; note = 2'O-methyl-nucleotide
  modified_base 4: mod_base = OTHER; note = 2'O-methyl-nucleotide
  modified_base 5: mod_base = OTHER; note = 2'O-methyl-nucleotide
  modified_base 6: mod_base = OTHER; note = 2'O-methyl-nucleotide
  modified_base 7: mod_base = OTHER; note = 2'O-methyl-nucleotide
  modified_base 8: mod_base = OTHER; note = 2'O-methyl-nucleotide
  modified_base 9: mod_base = OTHER; note = 2'O-methyl-nucleotide
  modified_base 10: mod_base = OTHER; note = 2'fluoro-nucleotide
  modified_base 11: mod_base = OTHER; note = 2'fluoro-nucleotide
  modified_base 12: mod_base = OTHER; note = 2'fluoro-nucleotide
  modified_base 13: mod_base = OTHER; note = 2'O-methyl-nucleotide
  modified_base 14: mod_base = OTHER; note = 2'O-methyl-nucleotide
  modified_base 15: mod_base = OTHER; note = 2'O-methyl-nucleotide
  modified_base 16: mod_base = OTHER; note = 2'O-methyl-nucleotide
  modified_base 17: mod_base = OTHER; note = 2'O-methyl-nucleotide
  modified_base 18: mod_base = OTHER; note = 2'O-methyl-nucleotide
  modified_base 19: mod_base = OTHER; note = 2'O-methyl-nucleotide
  modified_base 20: mod_base = OTHER; note = 2'O-methyl-nucleotide
  modified_base 21: mod_base = OTHER; note = 2'O-methyl-nucleotide phosphorothioate
  modified_base 22: mod_base = OTHER; note = 2'O-methyl-nucleotide phosphorothioate
  modified_base 23: mod_base = OTHER; note = Inverted abasic nucleotide
natagtctacaaaccagttgaan

SEQ ID NO: 428 - RNA, 21 nt, synthetic construct
  source 1..21: mol_type = other RNA
  modified_base 1: mod_base = OTHER; note = Vinyl phosphonate 2'O-methyl-nucleotide phosphorothioate
  modified_base 2: mod_base = OTHER; note = 2'fluoro-nucleotide phosphorothioate
  modified_base 3: mod_base = OTHER; note = Unlocked nucleotide
  modified_base 4: mod_base = OTHER; note = 2'O-methyl-nucleotide
  modified_base 5: mod_base = OTHER; note = 2'O-methyl-nucleotide
  modified_base 6: mod_base = OTHER; note = 2'O-methyl-nucleotide
  modified_base 7: mod_base = OTHER; note = 2'O-methyl-nucleotide
  modified_base 8: mod_base = OTHER; note = 2'O-methyl-nucleotide
  modified_base 9: mod_base = OTHER; note = 2'O-methyl-nucleotide
  modified_base 10: mod_base = OTHER; note = 2'O-methyl-nucleotide
  modified_base 11: mod_base = OTHER; note = 2'O-methyl-nucleotide
  modified_base 12: mod_base = OTHER; note = 2'O-methyl-nucleotide
  modified_base 13: mod_base = OTHER; note = 2'O-methyl-nucleotide
  modified_base 14: mod_base = OTHER; note = 2'fluoro-nucleotide
  modified_base 15: mod_base = OTHER; note = 2'O-methyl-nucleotide
  modified_base 16: mod_base = OTHER; note = 2'fluoro-nucleotide
  modified_base 17: mod_base = OTHER; note = 2'O-methyl-nucleotide
  modified_base 18: mod_base = OTHER; note = 2'O-methyl-nucleotide
  modified_base 19: mod_base = OTHER; note = 2'O-methyl-nucleotide phosphorothioate
  modified_base 20: mod_base = OTHER; note = 2'O-methyl-nucleotide phosphorothioate
  modified_base 21: mod_base = OTHER; note = 2'O-methyl-nucleotide
ttcaactggtttgtagactat

SEQ ID NO: 429 - RNA, 23 nt, synthetic construct
  source 1..23: mol_type = other RNA
  modified_base 1: mod_base = OTHER; note = Inverted abasic nucleotide phosphorothioate
  modified_base 2: mod_base = OTHER; note = 2'O-methyl-nucleotide phosphorothioate
  modified_base 3: mod_base = OTHER; note = 2'O-methyl-nucleotide
  modified_base 4: mod_base = OTHER; note = 2'O-methyl-nucleotide
  modified_base 5: mod_base = OTHER; note = 2'O-methyl-nucleotide
  modified_base 6: mod_base = OTHER; note = 2'O-methyl-nucleotide
  modified_base 7: mod_base = OTHER; note = 2'O-methyl-nucleotide
  modified_base 8: mod_base = OTHER; note = 2'O-methyl-nucleotide
  modified_base 9: mod_base = OTHER; note = 2'O-methyl-nucleotide
  modified_base 10: mod_base = OTHER; note = 2'fluoro-nucleotide
  modified_base 11: mod_base = OTHER; note = 2'fluoro-nucleotide
  modified_base 12: mod_base = OTHER; note = 2'fluoro-nucleotide
  modified_base 13: mod_base = OTHER; note = 2'O-methyl-nucleotide
  modified_base 14: mod_base = OTHER; note = 2'O-methyl-nucleotide
  modified_base 15: mod_base = OTHER; note = 2'O-methyl-nucleotide
  modified_base 16: mod_base = OTHER; note = 2'O-methyl-nucleotide
  modified_base 17: mod_base = OTHER; note = 2'O-methyl-nucleotide
  modified_base 18: mod_base = OTHER; note = 2'O-methyl-nucleotide
  modified_base 19: mod_base = OTHER; note = 2'O-methyl-nucleotide
  modified_base 20: mod_base = OTHER; note = 2'O-methyl-nucleotide
  modified_base 21: mod_base = OTHER; note = 2'O-methyl-nucleotide phosphorothioate
  modified_base 22: mod_base = OTHER; note = 2'O-methyl-nucleotide phosphorothioate
  modified_base 23: mod_base = OTHER; note = Inverted abasic nucleotide
natagtctacaaaccagttgaan

SEQ ID NO: 430 - RNA, 21 nt, synthetic construct
  source 1..21: mol_type = other RNA
  modified_base 1: mod_base = OTHER; note = Vinyl phosphonate 2'O-methyl-nucleotide phosphorothioate
  modified_base 2: mod_base = OTHER; note = 2'fluoro-nucleotide phosphorothioate
  modified_base 3: mod_base = OTHER; note = 2'O-methyl-nucleotide
  modified_base 4: mod_base = OTHER; note = Unlocked nucleotide
  modified_base 5: mod_base = OTHER; note = 2'O-methyl-nucleotide
  modified_base 6: mod_base = OTHER; note = 2'O-methyl-nucleotide
  modified_base 7: mod_base = OTHER; note = 2'O-methyl-nucleotide
  modified_base 8: mod_base = OTHER; note = 2'O-methyl-nucleotide
  modified_base 9: mod_base = OTHER; note = 2'O-methyl-nucleotide
  modified_base 10: mod_base = OTHER; note = 2'O-methyl-nucleotide
  modified_base 11: mod_base = OTHER; note = 2'O-methyl-nucleotide
  modified_base 12: mod_base = OTHER; note = 2'O-methyl-nucleotide
  modified_base 13: mod_base = OTHER; note = 2'O-methyl-nucleotide
  modified_base 14: mod_base = OTHER; note = 2'fluoro-nucleotide
  modified_base 15: mod_base = OTHER; note = 2'O-methyl-nucleotide
  modified_base 16: mod_base = OTHER; note = 2'fluoro-nucleotide
  modified_base 17: mod_base = OTHER; note = 2'O-methyl-nucleotide
  modified_base 18: mod_base = OTHER; note = 2'O-methyl-nucleotide
  modified_base 19: mod_base = OTHER; note = 2'O-methyl-nucleotide phosphorothioate
  modified_base 20: mod_base = OTHER; note = 2'O-methyl-nucleotide phosphorothioate
  modified_base 21: mod_base = OTHER; note = 2'O-methyl-nucleotide
ttcaactggtttgtagactat

SEQ ID NO: 431 - RNA, 23 nt, synthetic construct
  source 1..23: mol_type = other RNA
  modified_base 1: mod_base = OTHER; note = Inverted abasic nucleotide phosphorothioate
  modified_base 2: mod_base = OTHER; note = 2'O-methyl-nucleotide phosphorothioate
  modified_base 3: mod_base = OTHER; note = 2'O-methyl-nucleotide
  modified_base 4: mod_base = OTHER; note = 2'O-methyl-nucleotide
  modified_base 5: mod_base = OTHER; note = 2'O-methyl-nucleotide
  modified_base 6: mod_base = OTHER; note = 2'O-methyl-nucleotide
  modified_base 7: mod_base = OTHER; note = 2'O-methyl-nucleotide
  modified_base 8: mod_base = OTHER; note = 2'O-methyl-nucleotide
  modified_base 9: mod_base = OTHER; note = 2'O-methyl-nucleotide
  modified_base 10: mod_base = OTHER; note = 2'fluoro-nucleotide
  modified_base 11: mod_base = OTHER; note = 2'fluoro-nucleotide
  modified_base 12: mod_base = OTHER; note = 2'fluoro-nucleotide
  modified_base 13: mod_base = OTHER; note = 2'O-methyl-nucleotide
  modified_base 14: mod_base = OTHER; note = 2'O-methyl-nucleotide
  modified_base 15: mod_base = OTHER; note = 2'O-methyl-nucleotide
  modified_base 16: mod_base = OTHER; note = 2'O-methyl-nucleotide
  modified_base 17: mod_base = OTHER; note = 2'O-methyl-nucleotide
  modified_base 18: mod_base = OTHER; note = 2'O-methyl-nucleotide
  modified_base 19: mod_base = OTHER; note = 2'O-methyl-nucleotide
  modified_base 20: mod_base = OTHER; note = 2'O-methyl-nucleotide
  modified_base 21: mod_base = OTHER; note = 2'O-methyl-nucleotide phosphorothioate
  modified_base 22: mod_base = OTHER; note = 2'O-methyl-nucleotide phosphorothioate
  modified_base 23: mod_base = OTHER; note = Inverted abasic nucleotide
natagtctacaaaccagttgaan

SEQ ID NO: 432 - RNA, 21 nt, synthetic construct
  source 1..21: mol_type = other RNA
  modified_base 1: mod_base = OTHER; note = Vinyl phosphonate 2'O-methyl-nucleotide phosphorothioate
  modified_base 2: mod_base = OTHER; note = 2'fluoro-nucleotide phosphorothioate
  modified_base 3: mod_base = OTHER; note = 2'O-methyl-nucleotide
  modified_base 4: mod_base = OTHER; note = 2'O-methyl-nucleotide
  modified_base 5: mod_base = OTHER; note = Unlocked nucleotide
  modified_base 6: mod_base = OTHER; note = 2'O-methyl-nucleotide
  modified_base 7: mod_base = OTHER; note = 2'O-methyl-nucleotide
  modified_base 8: mod_base = OTHER; note = 2'O-methyl-nucleotide
  modified_base 9: mod_base = OTHER; note = 2'O-methyl-nucleotide
  modified_base 10: mod_base = OTHER; note = 2'O-methyl-nucleotide
  modified_base 11: mod_base = OTHER; note = 2'O-methyl-nucleotide
  modified_base 12: mod_base = OTHER; note = 2'O-methyl-nucleotide
  modified_base 13: mod_base = OTHER; note = 2'O-methyl-nucleotide
  modified_base 14: mod_base = OTHER; note = 2'fluoro-nucleotide
  modified_base 15: mod_base = OTHER; note = 2'O-methyl-nucleotide
  modified_base 16: mod_base = OTHER; note = 2'fluoro-nucleotide
  modified_base 17: mod_base = OTHER; note = 2'O-methyl-nucleotide
  modified_base 18: mod_base = OTHER; note = 2'O-methyl-nucleotide
  modified_base 19: mod_base = OTHER; note = 2'O-methyl-nucleotide phosphorothioate
  modified_base 20: mod_base = OTHER; note = 2'O-methyl-nucleotide phosphorothioate
  modified_base 21: mod_base = OTHER; note = 2'O-methyl-nucleotide
ttcaactggtttgtagactat

SEQ ID NO: 433 - RNA, 23 nt, synthetic construct
  source 1..23: mol_type = other RNA
  modified_base 1: mod_base = OTHER; note = Inverted abasic nucleotide phosphorothioate
  modified_base 2: mod_base = OTHER; note = 2'O-methyl-nucleotide phosphorothioate
  modified_base 3: mod_base = OTHER; note = 2'O-methyl-nucleotide
  modified_base 4: mod_base = OTHER; note = 2'O-methyl-nucleotide
  modified_base 5: mod_base = OTHER; note = 2'O-methyl-nucleotide
  modified_base 6: mod_base = OTHER; note = 2'O-methyl-nucleotide
  modified_base 7: mod_base = OTHER; note = 2'O-methyl-nucleotide
  modified_base 8: mod_base = OTHER; note = 2'O-methyl-nucleotide
  modified_base 9: mod_base = OTHER; note = 2'O-methyl-nucleotide
  modified_base 10: mod_base = OTHER; note = 2'fluoro-nucleotide
  modified_base 11: mod_base = OTHER; note = 2'fluoro-nucleotide
  modified_base 12: mod_base = OTHER; note = 2'fluoro-nucleotide
  modified_base 13: mod_base = OTHER; note = 2'O-methyl-nucleotide
  modified_base 14: mod_base = OTHER; note = 2'O-methyl-nucleotide
  modified_base 15: mod_base = OTHER; note = 2'O-methyl-nucleotide
  modified_base 16: mod_base = OTHER; note = 2'O-methyl-nucleotide
  modified_base 17: mod_base = OTHER; note = 2'O-methyl-nucleotide
  modified_base 18: mod_base = OTHER; note = 2'O-methyl-nucleotide
  modified_base 19: mod_base = OTHER; note = 2'O-methyl-nucleotide
  modified_base 20: mod_base = OTHER; note = 2'O-methyl-nucleotide
  modified_base 21: mod_base = OTHER; note = 2'O-methyl-nucleotide phosphorothioate
  modified_base 22: mod_base = OTHER; note = 2'O-methyl-nucleotide phosphorothioate
  modified_base 23: mod_base = OTHER; note = Inverted abasic nucleotide
natagtctacaaaccagttgaan

SEQ ID NO: 434 - RNA, 21 nt, synthetic construct
  source 1..21: mol_type = other RNA
  modified_base 1: mod_base = OTHER; note = Vinyl phosphonate 2'O-methyl-nucleotide phosphorothioate
  modified_base 2: mod_base = OTHER; note = 2'fluoro-nucleotide phosphorothioate
  modified_base 3: mod_base = OTHER; note = 2'O-methyl-nucleotide
  modified_base 4: mod_base = OTHER; note = 2'O-methyl-nucleotide
  modified_base 5: mod_base = OTHER; note = 2'O-methyl-nucleotide
  modified_base 6: mod_base = OTHER; note = Unlocked nucleotide
  modified_base 7: mod_base = OTHER; note = 2'O-methyl-nucleotide
  modified_base 8: mod_base = OTHER; note = 2'O-methyl-nucleotide
  modified_base 9: mod_base = OTHER; note = 2'O-methyl-nucleotide
  modified_base 10: mod_base = OTHER; note = 2'O-methyl-nucleotide
  modified_base 11: mod_base = OTHER; note = 2'O-methyl-nucleotide
  modified_base 12: mod_base = OTHER; note = 2'O-methyl-nucleotide
  modified_base 13: mod_base = OTHER; note = 2'O-methyl-nucleotide
  modified_base 14: mod_base = OTHER; note = 2'fluoro-nucleotide
  modified_base 15: mod_base = OTHER; note = 2'O-methyl-nucleotide
  modified_base 16: mod_base = OTHER; note = 2'fluoro-nucleotide
  modified_base 17: mod_base = OTHER; note = 2'O-methyl-nucleotide
  modified_base 18: mod_base = OTHER; note = 2'O-methyl-nucleotide
  modified_base 19: mod_base = OTHER; note = 2'O-methyl-nucleotide phosphorothioate
  modified_base 20: mod_base = OTHER; note = 2'O-methyl-nucleotide phosphorothioate
  modified_base 21: mod_base = OTHER; note = 2'O-methyl-nucleotide
ttcaactggtttgtagactat

SEQ ID NO: 435 - RNA, 23 nt, synthetic construct
  source 1..23: mol_type = other RNA
  modified_base 1: mod_base = OTHER; note = Inverted abasic nucleotide phosphorothioate
  modified_base 2: mod_base = OTHER; note = 2'O-methyl-nucleotide phosphorothioate
  modified_base 3: mod_base = OTHER; note = 2'O-methyl-nucleotide
  modified_base 4: mod_base = OTHER; note = 2'O-methyl-nucleotide
  modified_base 5: mod_base = OTHER; note = 2'O-methyl-nucleotide
  modified_base 6: mod_base = OTHER; note = 2'O-methyl-nucleotide
  modified_base 7: mod_base = OTHER; note = 2'O-methyl-nucleotide
  modified_base 8: mod_base = OTHER; note = 2'O-methyl-nucleotide
  modified_base 9: mod_base = OTHER; note = 2'O-methyl-nucleotide
  modified_base 10: mod_base = OTHER; note = 2'fluoro-nucleotide
  modified_base 11: mod_base = OTHER; note = 2'fluoro-nucleotide
  modified_base 12: mod_base = OTHER; note = 2'fluoro-nucleotide
  modified_base 13: mod_base = OTHER; note = 2'O-methyl-nucleotide
  modified_base 14: mod_base = OTHER; note = 2'O-methyl-nucleotide
  modified_base 15: mod_base = OTHER; note = 2'O-methyl-nucleotide
  modified_base 16: mod_base = OTHER; note = 2'O-methyl-nucleotide
  modified_base 17: mod_base = OTHER; note = 2'O-methyl-nucleotide
  modified_base 18: mod_base = OTHER; note = 2'O-methyl-nucleotide
  modified_base 19: mod_base = OTHER; note = 2'O-methyl-nucleotide
  modified_base 20: mod_base = OTHER; note = 2'O-methyl-nucleotide
  modified_base 21: mod_base = OTHER; note = 2'O-methyl-nucleotide phosphorothioate
  modified_base 22: mod_base = OTHER; note = 2'O-methyl-nucleotide phosphorothioate
  modified_base 23: mod_base = OTHER; note = Inverted abasic nucleotide
natagtctacaaaccagttgaan

SEQ ID NO: 436 - DNA, 21 bp, synthetic construct
  source 1..21: mol_type = other DNA
  modified_base 1: mod_base = OTHER; note = Vinyl phosphonate 2'O-methyl-nucleotide phosphorothioate
  modified_base 2: mod_base = OTHER; note = 2'fluoro-nucleotide phosphorothioate
  modified_base 3: mod_base = OTHER; note = 2'O-methyl-nucleotide
  modified_base 4: mod_base = OTHER; note = 2'O-methyl-nucleotide
  modified_base 5: mod_base = OTHER; note = 2'O-methyl-nucleotide
  modified_base 6: mod_base = OTHER; note = 2'fluoro-nucleotide
  modified_base 7: mod_base = OTHER; note = 2'O-methyl-nucleotide
  modified_base 8: mod_base = OTHER; note = 2'fluoro-nucleotide
  modified_base 9: mod_base = OTHER; note = 2'fluoro-nucleotide
  modified_base 10: mod_base = OTHER; note = 2'O-methyl-nucleotide
  modified_base 11: mod_base = OTHER; note = 2'O-methyl-nucleotide
  modified_base 12: mod_base = OTHER; note = 2'O-methyl-nucleotide
  modified_base 14: mod_base = OTHER; note = 2'fluoro-nucleotide
  modified_base 15: mod_base = OTHER; note = 2'O-methyl-nucleotide
  modified_base 16: mod_base = OTHER; note = 2'fluoro-nucleotide
  modified_base 17: mod_base = OTHER; note = 2'O-methyl-nucleotide
  modified_base 18: mod_base = OTHER; note = 2'O-methyl-nucleotide
  modified_base 19: mod_base = OTHER; note = 2'O-methyl-nucleotide phosphorothioate
  modified_base 20: mod_base = OTHER; note = 2'O-methyl-nucleotide phosphorothioate
  modified_base 21: mod_base = OTHER; note = 2'O-methyl-nucleotide
  misc_feature 1..12: note = RNA
  misc_feature 13: note = DNA
  misc_feature 14..21: note = RNA
ttcaactggtttgtagactat

SEQ ID NO: 437 - RNA, 23 nt, synthetic construct
  source 1..23: mol_type = other RNA
  modified_base 1: mod_base = OTHER; note = Inverted abasic nucleotide phosphorothioate
  modified_base 2: mod_base = OTHER; note = 2'O-methyl-nucleotide phosphorothioate
  modified_base 3: mod_base = OTHER; note = 2'O-methyl-nucleotide
  modified_base 4: mod_base = OTHER; note = 2'O-methyl-nucleotide
  modified_base 5: mod_base = OTHER; note = 2'O-methyl-nucleotide
  modified_base 6: mod_base = OTHER; note = 2'O-methyl-nucleotide
  modified_base 7: mod_base = OTHER; note = 2'O-methyl-nucleotide
  modified_base 8: mod_base = OTHER; note = 2'O-methyl-nucleotide
  modified_base 9: mod_base = OTHER; note = 2'O-methyl-nucleotide
  modified_base 10: mod_base = OTHER; note = 2'fluoro-nucleotide
  modified_base 11: mod_base = OTHER; note = 2'fluoro-nucleotide
  modified_base 12: mod_base = OTHER; note = 2'fluoro-nucleotide
  modified_base 13: mod_base = OTHER; note = 2'O-methyl-nucleotide
  modified_base 14: mod_base = OTHER; note = 2'O-methyl-nucleotide
  modified_base 15: mod_base = OTHER; note = 2'O-methyl-nucleotide
  modified_base 16: mod_base = OTHER; note = 2'O-methyl-nucleotide
  modified_base 17: mod_base = OTHER; note = 2'O-methyl-nucleotide
  modified_base 18: mod_base = OTHER; note = 2'O-methyl-nucleotide
  modified_base 19: mod_base = OTHER; note = 2'O-methyl-nucleotide
  modified_base 20: mod_base = OTHER; note = 2'O-methyl-nucleotide
  modified_base 21: mod_base = OTHER; note = 2'O-methyl-nucleotide phosphorothioate
  modified_base 22: mod_base = OTHER; note = 2'O-methyl-nucleotide phosphorothioate
  modified_base 23: mod_base = OTHER; note = Inverted abasic nucleotide
natagtctacaaaccagttgaan

SEQ ID NO: 438 - DNA, 21 bp, synthetic construct
  source 1..21: mol_type = other DNA
  modified_base 1: mod_base = OTHER; note = Vinyl phosphonate 2'O-methyl-nucleotide phosphorothioate
  modified_base 2: mod_base = OTHER; note = 2'fluoro-nucleotide phosphorothioate
  modified_base 3: mod_base = OTHER; note = 2'O-methyl-nucleotide
  modified_base 4: mod_base = OTHER; note = 2'O-methyl-nucleotide
  modified_base 5: mod_base = OTHER; note = 2'O-methyl-nucleotide
  modified_base 6: mod_base = OTHER; note = 2'fluoro-nucleotide
  modified_base 7: mod_base = OTHER; note = 2'O-methyl-nucleotide
  modified_base 8: mod_base = OTHER; note = 2'fluoro-nucleotide
  modified_base 9: mod_base = OTHER; note = 2'fluoro-nucleotide
  modified_base 10: mod_base = OTHER; note = 2'O-methyl-nucleotide
  modified_base 11: mod_base = OTHER; note = 2'O-methyl-nucleotide
  modified_base 12: mod_base = OTHER; note = 2'O-methyl-nucleotide
  modified_base 13: mod_base = OTHER; note = 2'O-methyl-nucleotide
  modified_base 15: mod_base = OTHER; note = 2'O-methyl-nucleotide
  modified_base 16: mod_base = OTHER; note = 2'fluoro-nucleotide
  modified_base 17: mod_base = OTHER; note = 2'O-methyl-nucleotide
  modified_base 18: mod_base = OTHER; note = 2'O-methyl-nucleotide
  modified_base 19: mod_base = OTHER; note = 2'O-methyl-nucleotide phosphorothioate
  modified_base 20: mod_base = OTHER; note = 2'O-methyl-nucleotide phosphorothioate
  modified_base 21: mod_base = OTHER; note = 2'O-methyl-nucleotide
  misc_feature 1..13: note = RNA
  misc_feature 14: note = DNA
  misc_feature 15..21: note = RNA
ttcaactggtttgtagactat

SEQ ID NO: 439 - RNA, 23 nt, synthetic construct
  source 1..23: mol_type = other RNA
  modified_base 1: mod_base = OTHER; note = Inverted abasic nucleotide phosphorothioate
  modified_base 2: mod_base = OTHER; note = 2'O-methyl-nucleotide phosphorothioate
  modified_base 3: mod_base = OTHER; note = 2'O-methyl-nucleotide
  modified_base 4: mod_base = OTHER; note = 2'O-methyl-nucleotide
  modified_base 5: mod_base = OTHER; note = 2'O-methyl-nucleotide
  modified_base 6: mod_base = OTHER; note = 2'O-methyl-nucleotide
  modified_base 7: mod_base = OTHER; note = 2'O-methyl-nucleotide
  modified_base 8: mod_base = OTHER; note = 2'O-methyl-nucleotide
  modified_base 9: mod_base = OTHER; note = 2'O-methyl-nucleotide
  modified_base 10: mod_base = OTHER; note = 2'fluoro-nucleotide
  modified_base 11: mod_base = OTHER; note = 2'fluoro-nucleotide
  modified_base 12: mod_base = OTHER; note = 2'fluoro-nucleotide
  modified_base 13: mod_base = OTHER; note = 2'O-methyl-nucleotide
  modified_base 14: mod_base = OTHER; note = 2'O-methyl-nucleotide
  modified_base 15: mod_base = OTHER; note = 2'O-methyl-nucleotide
  modified_base 16: mod_base = OTHER; note = 2'O-methyl-nucleotide
  modified_base 17: mod_base = OTHER; note = 2'O-methyl-nucleotide
  modified_base 18: mod_base = OTHER; note = 2'O-methyl-nucleotide
  modified_base 19: mod_base = OTHER; note = 2'O-methyl-nucleotide
  modified_base 20: mod_base = OTHER; note = 2'O-methyl-nucleotide
  modified_base 21: mod_base = OTHER; note = 2'O-methyl-nucleotide phosphorothioate
  modified_base 22: mod_base = OTHER; note = 2'O-methyl-nucleotide phosphorothioate
  modified_base 23: mod_base = OTHER; note = Inverted abasic nucleotide
natagtctacaaaccagttgaan

SEQ ID NO: 440 - DNA, 21 bp, synthetic construct
  source 1..21: mol_type = other DNA
  modified_base 1: mod_base = OTHER; note = Vinyl phosphonate 2'O-methyl-nucleotide phosphorothioate
  modified_base 2: mod_base = OTHER; note = 2'fluoro-nucleotide phosphorothioate
  modified_base 3: mod_base = OTHER; note = 2'O-methyl-nucleotide
  modified_base 4: mod_base = OTHER; note = 2'O-methyl-nucleotide
  modified_base 5: mod_base = OTHER; note = 2'O-methyl-nucleotide
  modified_base 6: mod_base = OTHER; note = 2'fluoro-nucleotide
  modified_base 7: mod_base = OTHER; note = 2'O-methyl-nucleotide
  modified_base 8: mod_base = OTHER; note = 2'fluoro-nucleotide
  modified_base 9: mod_base = OTHER; note = 2'fluoro-nucleotide
  modified_base 10: mod_base = OTHER; note = 2'O-methyl-nucleotide
  modified_base 11: mod_base = OTHER; note = 2'O-methyl-nucleotide
  modified_base 12: mod_base = OTHER; note = 2'O-methyl-nucleotide
  modified_base 13: mod_base = OTHER; note = 2'O-methyl-nucleotide
  modified_base 14: mod_base = OTHER; note = 2'fluoro-nucleotide
  modified_base 16: mod_base = OTHER; note = 2'fluoro-nucleotide
  modified_base 17: mod_base = OTHER; note = 2'O-methyl-nucleotide
  modified_base 18: mod_base = OTHER; note = 2'O-methyl-nucleotide
  modified_base 19: mod_base = OTHER; note = 2'O-methyl-nucleotide phosphorothioate
  modified_base 20: mod_base = OTHER; note = 2'O-methyl-nucleotide phosphorothioate
  modified_base 21: mod_base = OTHER; note = 2'O-methyl-nucleotide
  misc_feature 1..14: note = RNA
  misc_feature 15: note = DNA
  misc_feature 16..21: note = RNA
ttcaactggtttgtagactat

SEQ ID NO: 441 - RNA, 23 nt, synthetic construct
  source 1..23: mol_type = other RNA
  modified_base 1: mod_base = OTHER; note = Inverted abasic nucleotide phosphorothioate
  modified_base 2: mod_base = OTHER; note = 2'O-methyl-nucleotide phosphorothioate
  modified_base 3: mod_base = OTHER; note = 2'O-methyl-nucleotide
  modified_base 4: mod_base = OTHER; note = 2'O-methyl-nucleotide
  modified_base 5: mod_base = OTHER; note = 2'O-methyl-nucleotide
  modified_base 6: mod_base = OTHER; note = 2'O-methyl-nucleotide
  modified_base 7: mod_base = OTHER; note = 2'O-methyl-nucleotide
  modified_base 8: mod_base = OTHER; note = 2'O-methyl-nucleotide
  modified_base 9: mod_base = OTHER; note = 2'O-methyl-nucleotide
  modified_base 10: mod_base = OTHER; note = 2'fluoro-nucleotide
  modified_base 11: mod_base = OTHER; note = 2'fluoro-nucleotide
  modified_base 12: mod_base = OTHER; note = 2'fluoro-nucleotide
  modified_base 13: mod_base = OTHER; note = 2'O-methyl-nucleotide
  modified_base 14: mod_base = OTHER; note = 2'O-methyl-nucleotide
  modified_base 15: mod_base = OTHER; note = 2'O-methyl-nucleotide
  modified_base 16: mod_base = OTHER; note = 2'O-methyl-nucleotide
  modified_base 17: mod_base = OTHER; note = 2'O-methyl-nucleotide
  modified_base 18: mod_base = OTHER; note = 2'O-methyl-nucleotide
  modified_base 19: mod_base = OTHER; note = 2'O-methyl-nucleotide
  modified_base 20: mod_base = OTHER; note = 2'O-methyl-nucleotide
  modified_base 21: mod_base = OTHER; note = 2'O-methyl-nucleotide phosphorothioate
  modified_base 22: mod_base = OTHER; note = 2'O-methyl-nucleotide phosphorothioate
  modified_base 23: mod_base = OTHER; note = Inverted abasic nucleotide
natagtctacaaaccagttgaan

SEQ ID NO: 442 - DNA, 21 bp, synthetic construct
  source 1..21: mol_type = other DNA
  modified_base 1: mod_base = OTHER; note = Vinyl phosphonate 2'O-methyl-nucleotide phosphorothioate
  modified_base 2: mod_base = OTHER; note = 2'fluoro-nucleotide phosphorothioate
  modified_base 3: mod_base = OTHER; note = 2'O-methyl-nucleotide
  modified_base 4: mod_base = OTHER; note = 2'O-methyl-nucleotide
  modified_base 5: mod_base = OTHER; note = 2'O-methyl-nucleotide
  modified_base 6: mod_base = OTHER; note = 2'fluoro-nucleotide
  modified_base 7: mod_base = OTHER; note = 2'O-methyl-nucleotide
  modified_base 8: mod_base = OTHER; note = 2'fluoro-nucleotide
  modified_base 9: mod_base = OTHER; note = 2'fluoro-nucleotide
  modified_base 10: mod_base = OTHER; note = 2'O-methyl-nucleotide
  modified_base 11: mod_base = OTHER; note = 2'O-methyl-nucleotide
  modified_base 12: mod_base = OTHER; note = 2'O-methyl-nucleotide
  modified_base 13: mod_base = OTHER; note = 2'O-methyl-nucleotide
  modified_base 14: mod_base = OTHER; note = 2'fluoro-nucleotide
  modified_base 15: mod_base = OTHER; note = 2'O-methyl-nucleotide
  modified_base 17: mod_base = OTHER; note = 2'O-methyl-nucleotide
  modified_base 18: mod_base = OTHER; note = 2'O-methyl-nucleotide
  modified_base 19: mod_base = OTHER; note = 2'O-methyl-nucleotide phosphorothioate
  modified_base 20: mod_base = OTHER; note = 2'O-methyl-nucleotide phosphorothioate
  modified_base 21: mod_base = OTHER; note = 2'O-methyl-nucleotide
  misc_feature 1..15: note = RNA
  misc_feature 16: note = DNA
  misc_feature 17..21: note = RNA
ttcaactggtttgtagactat

SEQ ID NO: 443 - RNA, 20 nt, synthetic construct
  source 1..20: mol_type = other RNA
  modified_base 1: mod_base = OTHER; note = Inverted abasic nucleotide phosphorothioate
  modified_base 2: mod_base = OTHER; note = 2'O-methyl-nucleotide phosphorothioate
  modified_base 3: mod_base = OTHER; note = 2'O-methyl-nucleotide
  modified_base 4: mod_base = OTHER; note = 2'O-methyl-nucleotide
  modified_base 5: mod_base = OTHER; note = 2'O-methyl-nucleotide
  modified_base 6: mod_base = OTHER; note = 2'O-methyl-nucleotide
  modified_base 7: mod_base = OTHER; note = 2'O-methyl-nucleotide
  modified_base 8: mod_base = OTHER; note = 2'fluoro-nucleotide
  modified_base 9: mod_base = OTHER; note = 2'fluoro-nucleotide
  modified_base 10: mod_base = OTHER; note = 2'fluoro-nucleotide
  modified_base 11: mod_base = OTHER; note = 2'O-methyl-nucleotide
  modified_base 12: mod_base = OTHER; note = 2'O-methyl-nucleotide
  modified_base 13: mod_base = OTHER; note = 2'fluoro-nucleotide
  modified_base 14: mod_base = OTHER; note = 2'O-methyl-nucleotide
  modified_base 15: mod_base = OTHER; note = 2'O-methyl-nucleotide
  modified_base 16: mod_base = OTHER; note = 2'O-methyl-nucleotide
  modified_base 17: mod_base = OTHER; note = 2'O-methyl-nucleotide
  modified_base 18: mod_base = OTHER; note = 2'fluoro-nucleotide phosphorothioate
  modified_base 19: mod_base = OTHER; note = 2'O-methyl-nucleotide phosphorothioate
  modified_base 20: mod_base = OTHER; note = 2'O-methyl-nucleotide
nagtctacaaaccagttgaa

SEQ ID NO: 444 - RNA, 21 nt, synthetic construct
  source 1..21: mol_type = other RNA
  modified_base 1: mod_base = OTHER; note = Vinyl phosphonate 2'O-methyl-nucleotide phosphorothioate
  modified_base 2: mod_base = OTHER; note = 2'fluoro-nucleotide phosphorothioate
  modified_base 3: mod_base = OTHER; note = 2'O-methyl-nucleotide
  modified_base 4: mod_base = OTHER; note = 2'O-methyl-nucleotide
  modified_base 5: mod_base = OTHER; note = 2'O-methyl-nucleotide
  modified_base 6: mod_base = OTHER; note = 2'fluoro-nucleotide
  modified_base 7: mod_base = OTHER; note = Unlocked nucleotide
  modified_base 8: mod_base = OTHER; note = 2'O-methyl-nucleotide
  modified_base 9: mod_base = OTHER; note = 2'O-methyl-nucleotide
  modified_base 10: mod_base = OTHER; note = 2'O-methyl-nucleotide
  modified_base 11: mod_base = OTHER; note = 2'O-methyl-nucleotide
  modified_base 12: mod_base = OTHER; note = 2'O-methyl-nucleotide
  modified_base 13: mod_base = OTHER; note = 2'O-methyl-nucleotide
  modified_base 14: mod_base = OTHER; note = 2'fluoro-nucleotide
  modified_base 15: mod_base = OTHER; note = 2'O-methyl-nucleotide
  modified_base 16: mod_base = OTHER; note = 2'fluoro-nucleotide
  modified_base 17: mod_base = OTHER; note = 2'O-methyl-nucleotide
  modified_base 18: mod_base = OTHER; note = 2'O-methyl-nucleotide
  modified_base 19: mod_base = OTHER; note = 2'O-methyl-nucleotide phosphorothioate
  modified_base 20: mod_base = OTHER; note = 2'O-methyl-nucleotide phosphorothioate
  modified_base 21: mod_base = OTHER; note = 2'O-methyl-nucleotide
ttcaactggtttgtagactat

SEQ ID NO: 445 - RNA, 20 nt, synthetic construct
  source 1..20: mol_type = other RNA
  modified_base 1: mod_base = OTHER; note = Inverted abasic nucleotide phosphorothioate
  modified_base 2: mod_base = OTHER; note = 2'O-methyl-nucleotide phosphorothioate
  modified_base 3: mod_base = OTHER; note = 2'O-methyl-nucleotide
  modified_base 4: mod_base = OTHER; note = 2'fluoro-nucleotide
  modified_base 5: mod_base = OTHER; note = 2'O-methyl-nucleotide
  modified_base 6: mod_base = OTHER; note = 2'O-methyl-nucleotide
  modified_base 7: mod_base = OTHER; note = 2'O-methyl-nucleotide
  modified_base 8: mod_base = OTHER; note = 2'fluoro-nucleotide
  modified_base 9: mod_base = OTHER; note = 2'fluoro-nucleotide
  modified_base 10: mod_base = OTHER; note = 2'fluoro-nucleotide
  modified_base 11: mod_base = OTHER; note = 2'O-methyl-nucleotide
  modified_base 12: mod_base = OTHER; note = 2'O-methyl-nucleotide
  modified_base 13: mod_base = OTHER; note = 2'fluoro-nucleotide
  modified_base 14: mod_base = OTHER; note = 2'O-methyl-nucleotide
  modified_base 15: mod_base = OTHER; note = 2'O-methyl-nucleotide
  modified_base 16: mod_base = OTHER; note = 2'O-methyl-nucleotide
  modified_base 17: mod_base = OTHER; note = 2'O-methyl-nucleotide
  modified_base 18: mod_base = OTHER; note = 2'O-methyl-nucleotide phosphorothioate
  modified_base 19: mod_base = OTHER; note = 2'O-methyl-nucleotide phosphorothioate
  modified_base 20: mod_base = OTHER; note = 2'O-methyl-nucleotide
nagtctacaaaccagttgaa

SEQ ID NO: 446 - RNA, 21 nt, synthetic construct
  source 1..21: mol_type = other RNA
  modified_base 1: mod_base = OTHER; note = Vinyl phosphonate 2'O-methyl-nucleotide phosphorothioate
  modified_base 2: mod_base = OTHER; note = 2'fluoro-nucleotide phosphorothioate
  modified_base 3: mod_base = OTHER; note = 2'O-methyl-nucleotide
  modified_base 4: mod_base = OTHER; note = 2'O-methyl-nucleotide
  modified_base 5: mod_base = OTHER; note = 2'O-methyl-nucleotide
  modified_base 6: mod_base = OTHER; note = 2'fluoro-nucleotide
  modified_base 7: mod_base = OTHER; note = Unlocked nucleotide
  modified_base 8: mod_base = OTHER; note = 2'O-methyl-nucleotide
  modified_base 9: mod_base = OTHER; note = 2'O-methyl-nucleotide
  modified_base 10: mod_base = OTHER; note = 2'O-methyl-nucleotide
  modified_base 11: mod_base = OTHER; note = 2'O-methyl-nucleotide
  modified_base 12: mod_base = OTHER; note = 2'O-methyl-nucleotide
  modified_base 13: mod_base = OTHER; note = 2'O-methyl-nucleotide
  modified_base 14: mod_base = OTHER; note = 2'fluoro-nucleotide
  modified_base 15: mod_base = OTHER; note = 2'O-methyl-nucleotide
  modified_base 16: mod_base = OTHER; note = 2'fluoro-nucleotide
  modified_base 17: mod_base = OTHER; note = 2'O-methyl-nucleotide
  modified_base 18: mod_base = OTHER; note = 2'O-methyl-nucleotide
  modified_base 19: mod_base = OTHER; note = 2'O-methyl-nucleotide phosphorothioate
  modified_base 20: mod_base = OTHER; note = 2'O-methyl-nucleotide phosphorothioate
  modified_base 21: mod_base = OTHER; note = 2'O-methyl-nucleotide
ttcaactggtttgtagactat

SEQ ID NO: 447 - RNA, 20 nt, synthetic construct
  source 1..20: mol_type = other RNA
  modified_base 1: mod_base = OTHER; note = Inverted abasic nucleotide phosphorothioate
  modified_base 2: mod_base = OTHER; note = 2'O-methyl-nucleotide phosphorothioate
  modified_base 3: mod_base = OTHER; note = 2'O-methyl-nucleotide
  modified_base 4: mod_base = OTHER; note = 2'O-methyl-nucleotide
  modified_base 5: mod_base = OTHER; note = 2'O-methyl-nucleotide
  modified_base 6: mod_base = OTHER; note = 2'O-methyl-nucleotide
  modified_base 7: mod_base = OTHER; note = 2'O-methyl-nucleotide
  modified_base 8: mod_base = OTHER; note = 2'fluoro-nucleotide
  modified_base 9: mod_base = OTHER; note = 2'fluoro-nucleotide
  modified_base 10: mod_base = OTHER; note = 2'fluoro-nucleotide
  modified_base 11: mod_base = OTHER; note = 2'O-methyl-nucleotide
  modified_base 12: mod_base = OTHER; note = 2'O-methyl-nucleotide
  modified_base 13: mod_base = OTHER; note = 2'fluoro-nucleotide
  modified_base 14: mod_base = OTHER; note = 2'O-methyl-nucleotide
  modified_base 15: mod_base = OTHER; note = 2'O-methyl-nucleotide
  modified_base 16: mod_base = OTHER; note = 2'O-methyl-nucleotide
  modified_base 17: mod_base = OTHER; note = 2'O-methyl-nucleotide
  modified_base 18: mod_base = OTHER; note = 2'O-methyl-nucleotide phosphorothioate
  modified_base 19: mod_base = OTHER; note = 2'O-methyl-nucleotide phosphorothioate
  modified_base 20: mod_base = OTHER; note = 2'O-methyl-nucleotide
nagtctacaaaccagttgaa

SEQ ID NO: 448 - RNA, 21 nt, synthetic construct
  source 1..21: mol_type = other RNA
  modified_base 1: mod_base = OTHER; note = Vinyl phosphonate 2'O-methyl-nucleotide phosphorothioate
  modified_base 2: mod_base = OTHER; note = 2'fluoro-nucleotide phosphorothioate
  modified_base 3: mod_base = OTHER; note = 2'O-methyl-nucleotide
  modified_base 4: mod_base = OTHER; note = 2'O-methyl-nucleotide
  modified_base 5: mod_base = OTHER; note = 2'O-methyl-nucleotide
  modified_base 6: mod_base = OTHER; note = 2'fluoro-nucleotide
  modified_base 7: mod_base = OTHER; note = Unlocked nucleotide
  modified_base 8: mod_base = OTHER; note = 2'O-methyl-nucleotide
  modified_base 9: mod_base = OTHER; note = 2'O-methyl-nucleotide
  modified_base 10: mod_base = OTHER; note = 2'O-methyl-nucleotide
  modified_base 11: mod_base = OTHER; note = 2'O-methyl-nucleotide
  modified_base 12: mod_base = OTHER; note = 2'O-methyl-nucleotide
  modified_base 13: mod_base = OTHER; note = 2'O-methyl-nucleotide
  modified_base 14: mod_base = OTHER; note = 2'fluoro-nucleotide
  modified_base 15: mod_base = OTHER; note = 2'O-methyl-nucleotide
  modified_base 16: mod_base = OTHER; note = 2'fluoro-nucleotide
  modified_base 17: mod_base = OTHER; note = 2'O-methyl-nucleotide
  modified_base 18: mod_base = OTHER; note = 2'O-methyl-nucleotide
  modified_base 19: mod_base = OTHER; note = 2'O-methyl-nucleotide phosphorothioate
  modified_base 20: mod_base = OTHER; note = 2'O-methyl-nucleotide phosphorothioate
  modified_base 21: mod_base = OTHER; note = 2'O-methyl-nucleotide
ttcaactggtttgtagactat

SEQ ID NO: 449 - RNA, 21 nt, synthetic construct
  source 1..21: mol_type = other RNA
  modified_base 1: mod_base = OTHER; note = 2'O-methyl-nucleotide phosphorothioate
  modified_base 2: mod_base = OTHER; note = 2'O-methyl-nucleotide phosphorothioate
  modified_base 3: mod_base = OTHER; note = 2'fluoro-nucleotide
  modified_base 4: mod_base = OTHER; note = 2'O-methyl-nucleotide
  modified_base 5: mod_base = OTHER; note = 2'fluoro-nucleotide
  modified_base 6: mod_base = OTHER; note = 2'O-methyl-nucleotide
  modified_base 7: mod_base = OTHER; note = 2'fluoro-nucleotide
  modified_base 8: mod_base = OTHER; note = 2'O-methyl-nucleotide
  modified_base 9: mod_base = OTHER; note = 2'fluoro-nucleotide
  modified_base 10: mod_base = OTHER; note = 2'O-methyl-nucleotide
  modified_base 11: mod_base = OTHER; note = 2'fluoro-nucleotide
  modified_base 12: mod_base = OTHER; note = 2'O-methyl-nucleotide
  modified_base 13: mod_base = OTHER; note = 2'fluoro-nucleotide
  modified_base 14: mod_base = OTHER; note = 2'O-methyl-nucleotide
  modified_base 15: mod_base = OTHER; note = 2'fluoro-nucleotide
  modified_base 16: mod_base = OTHER; note = 2'O-methyl-nucleotide
  modified_base 17: mod_base = OTHER; note = 2'fluoro-nucleotide
  modified_base 18: mod_base = OTHER; note = 2'O-methyl-nucleotide
  modified_base 19: mod_base = OTHER; note = 2'fluoro-nucleotide phosphorothioate
  modified_base 20: mod_base = OTHER; note = 2'O-methyl-nucleotide phosphorothioate
  modified_base 21: mod_base = OTHER; note = 2'O-methyl-nucleotide
aagtgtggctcattaggcatt

SEQ ID NO: 450 - RNA, 21 nt, synthetic construct
  source 1..21: mol_type = other RNA
  modified_base 1: mod_base = OTHER; note = Vinyl phosphonate 2'O-methyl-nucleotide phosphorothioate
  modified_base 2: mod_base = OTHER; note = 2'fluoro-nucleotide phosphorothioate
  modified_base 3: mod_base = OTHER; note = 2'O-methyl-nucleotide
  modified_base 4: mod_base = OTHER; note = 2'fluoro-nucleotide
  modified_base 5: mod_base = OTHER; note = 2'O-methyl-nucleotide
  modified_base 6: mod_base = OTHER; note = 2'fluoro-nucleotide
  modified_base 7: mod_base = OTHER; note = 2'O-methyl-nucleotide
  modified_base 8: mod_base = OTHER; note = 2'fluoro-nucleotide
  modified_base 9: mod_base = OTHER; note = 2'O-methyl-nucleotide
  modified_base 10: mod_base = OTHER; note = 2'fluoro-nucleotide
  modified_base 11: mod_base = OTHER; note = 2'O-methyl-nucleotide
  modified_base 12: mod_base = OTHER; note = 2'fluoro-nucleotide
  modified_base 13: mod_base = OTHER; note = 2'O-methyl-nucleotide
  modified_base 14: mod_base = OTHER; note = 2'fluoro-nucleotide
  modified_base 15: mod_base = OTHER; note = 2'O-methyl-nucleotide
  modified_base 16: mod_base = OTHER; note = 2'fluoro-nucleotide
  modified_base 17: mod_base = OTHER; note = 2'O-methyl-nucleotide
  modified_base 18: mod_base = OTHER; note = 2'fluoro-nucleotide
  modified_base 19: mod_base = OTHER; note = 2'O-methyl-nucleotide phosphorothioate
  modified_base 20: mod_base = OTHER; note = 2'O-methyl-nucleotide phosphorothioate
  modified_base 21: mod_base = OTHER; note = 2'O-methyl-nucleotide
tgcctaatgagccacactttt

SEQ ID NO: 451 - RNA, 19 nt, synthetic construct
  source 1..19: mol_type = other RNA
  modified_base 1: mod_base = OTHER; note = 2'O-methyl-nucleotide phosphorothioate
  modified_base 2: mod_base = OTHER; note = 2'O-methyl-nucleotide phosphorothioate
  modified_base 3: mod_base = OTHER; note = 2'fluoro-nucleotide
  modified_base 4: mod_base = OTHER; note = 2'O-methyl-nucleotide
  modified_base 5: mod_base = OTHER; note = 2'O-methyl-nucleotide
  modified_base 6: mod_base = OTHER; note = 2'O-methyl-nucleotide
  modified_base 7: mod_base = OTHER; note = 2'fluoro-nucleotide
  modified_base 8: mod_base = OTHER; note = 2'fluoro-nucleotide
  modified_base 9: mod_base = OTHER; note = 2'fluoro-nucleotide
  modified_base 10: mod_base = OTHER; note = 2'O-methyl-nucleotide
  modified_base 11: mod_base = OTHER; note = 2'O-methyl-nucleotide
  modified_base 12: mod_base = OTHER; note = 2'fluoro-nucleotide
  modified_base 13: mod_base = OTHER; note = 2'O-methyl-nucleotide
  modified_base 14: mod_base = OTHER; note = 2'O-methyl-nucleotide
  modified_base 15: mod_base = OTHER; note = 2'O-methyl-nucleotide
  modified_base 16: mod_base = OTHER; note = 2'O-methyl-nucleotide
  modified_base 17: mod_base = OTHER; note = 2'fluoro-nucleotide
  modified_base 18: mod_base = OTHER; note = 2'O-methyl-nucleotide
  modified_base 19: mod_base = OTHER; note = 2'O-methyl-nucleotide
aagtgtggctcattaggca

SEQ ID NO: 452 - RNA, 21 nt, synthetic construct
  source 1..21: mol_type = other RNA
  modified_base 1: mod_base = OTHER; note = Vinyl phosphonate 2'O-methyl-nucleotide phosphorothioate
  modified_base 2: mod_base = OTHER; note = 2'fluoro-nucleotide phosphorothioate
  modified_base 3: mod_base = OTHER; note = 2'O-methyl-nucleotide
  modified_base 4: mod_base = OTHER; note = 2'O-methyl-nucleotide
  modified_base 5: mod_base = OTHER; note = 2'O-methyl-nucleotide
  modified_base 6: mod_base = OTHER; note = 2'fluoro-nucleotide
  modified_base 7: mod_base = OTHER; note = 2'O-methyl-nucleotide
  modified_base 8: mod_base = OTHER; note = 2'O-methyl-nucleotide
  modified_base 9: mod_base = OTHER; note = 2'O-methyl-nucleotide
  modified_base 10: mod_base = OTHER; note = 2'O-methyl-nucleotide
  modified_base 11: mod_base = OTHER; note = 2'O-methyl-nucleotide
  modified_base 12: mod_base = OTHER; note = 2'O-methyl-nucleotide
  modified_base 13: mod_base = OTHER; note = 2'O-methyl-nucleotide
  modified_base 14: mod_base = OTHER; note = 2'fluoro-nucleotide
  modified_base 15: mod_base = OTHER; note = 2'O-methyl-nucleotide
  modified_base 16: mod_base = OTHER; note = 2'fluoro-nucleotide
  modified_base 17: mod_base = OTHER; note = 2'O-methyl-nucleotide
  modified_base 18: mod_base = OTHER; note = 2'O-methyl-nucleotide
  modified_base 19: mod_base = OTHER; note = 2'O-methyl-nucleotide phosphorothioate
  modified_base 20: mod_base = OTHER; note = 2'O-methyl-nucleotide phosphorothioate
  modified_base 21: mod_base = OTHER; note = 2'O-methyl-nucleotide
tgcctaatgagccacacttgg

SEQ ID NO: 453 - RNA, 19 nt, synthetic construct
  source 1..19: mol_type = other RNA
  modified_base 1: mod_base = OTHER; note = 2'O-methyl-nucleotide phosphorothioate
  modified_base 2: mod_base = OTHER; note = 2'O-methyl-nucleotide phosphorothioate
  modified_base 3: mod_base = OTHER; note = 2'fluoro-nucleotide
  modified_base 4: mod_base = OTHER; note = 2'O-methyl-nucleotide
  modified_base 5: mod_base = OTHER; note = 2'O-methyl-nucleotide
  modified_base 6: mod_base = OTHER; note = 2'O-methyl-nucleotide
  modified_base 7: mod_base = OTHER; note = 2'fluoro-nucleotide
  modified_base 8: mod_base = OTHER; note = 2'fluoro-nucleotide
  modified_base 9: mod_base = OTHER; note = 2'fluoro-nucleotide
  modified_base 10: mod_base = OTHER; note = 2'O-methyl-nucleotide
  modified_base 11: mod_base = OTHER; note = 2'O-methyl-nucleotide
  modified_base 12: mod_base = OTHER; note = 2'fluoro-nucleotide
  modified_base 13: mod_base = OTHER; note = 2'O-methyl-nucleotide
  modified_base 14: mod_base = OTHER; note = 2'O-methyl-nucleotide
  modified_base 15: mod_base = OTHER; note = 2'O-methyl-nucleotide
  modified_base 16: mod_base = OTHER; note = 2'O-methyl-nucleotide
  modified_base 17: mod_base = OTHER; note = 2'fluoro-nucleotide
  modified_base 18: mod_base = OTHER; note = 2'O-methyl-nucleotide
  modified_base 19: mod_base = OTHER; note = 2'O-methyl-nucleotide
aagtgtggctcattaggca

SEQ ID NO: 454 - RNA, 21 nt, synthetic construct
  source 1..21: mol_type = other RNA
  modified_base 1: mod_base = OTHER; note = Vinyl phosphonate 2'O-methyl-nucleotide phosphorothioate
  modified_base 2: mod_base = OTHER; note = 2'fluoro-nucleotide phosphorothioate
  modified_base 3: mod_base = OTHER; note = 2'O-methyl-nucleotide
  modified_base 4: mod_base = OTHER; note = 2'O-methyl-nucleotide
  modified_base 5: mod_base = OTHER; note = 2'O-methyl-nucleotide
  modified_base 6: mod_base = OTHER; note = 2'fluoro-nucleotide
  modified_base 7: mod_base = OTHER; note = Glycol nucleotide
  modified_base 8: mod_base = OTHER; note = 2'O-methyl-nucleotide
  modified_base 9: mod_base = OTHER; note = 2'O-methyl-nucleotide
  modified_base 10: mod_base = OTHER; note = 2'O-methyl-nucleotide
  modified_base 11: mod_base = OTHER; note = 2'O-methyl-nucleotide
  modified_base 12: mod_base = OTHER; note = 2'O-methyl-nucleotide
  modified_base 13: mod_base = OTHER; note = 2'O-methyl-nucleotide
  modified_base 14: mod_base = OTHER; note = 2'fluoro-nucleotide
  modified_base 15: mod_base = OTHER; note = 2'O-methyl-nucleotide
  modified_base 16: mod_base = OTHER; note = 2'fluoro-nucleotide
  modified_base 17: mod_base = OTHER; note = 2'O-methyl-nucleotide
  modified_base 18: mod_base = OTHER; note = 2'O-methyl-nucleotide
  modified_base 19: mod_base = OTHER; note = 2'O-methyl-nucleotide phosphorothioate
  modified_base 20: mod_base = OTHER; note = 2'O-methyl-nucleotide phosphorothioate
  modified_base 21: mod_base = OTHER; note = 2'O-methyl-nucleotide
tgcctaatgagccacacttgg

SEQ ID NO: 455 - RNA, 21 nt, synthetic construct
  source 1..21: mol_type = other RNA
  modified_base 1: mod_base = OTHER; note = Inverted abasic nucleotide phosphorothioate
  modified_base 2: mod_base = OTHER; note = 2'O-methyl-nucleotide phosphorothioate
  modified_base 3: mod_base = OTHER; note = 2'O-methyl-nucleotide
  modified_base 4: mod_base = OTHER; note = 2'O-methyl-nucleotide
  modified_base 5: mod_base = OTHER; note = 2'O-methyl-nucleotide
  modified_base 6: mod_base = OTHER; note = 2'O-methyl-nucleotide
  modified_base 7: mod_base = OTHER; note = 2'O-methyl-nucleotide
  modified_base 8: mod_base = OTHER; note = 2'fluoro-nucleotide
  modified_base 9: mod_base = OTHER; note = 2'fluoro-nucleotide
  modified_base 10: mod_base = OTHER; note = 2'fluoro-nucleotide
  modified_base 11: mod_base = OTHER; note = 2'O-methyl-nucleotide
  modified_base 12: mod_base = OTHER; note = 2'O-methyl-nucleotide
  modified_base 13: mod_base = OTHER; note = 2'O-methyl-nucleotide
  modified_base 14: mod_base = OTHER; note = 2'O-methyl-nucleotide
  modified_base 15: mod_base = OTHER; note = 2'O-methyl-nucleotide
  modified_base 16: mod_base = OTHER; note = 2'O-methyl-nucleotide
  modified_base 17: mod_base = OTHER; note = 2'O-methyl-nucleotide
  modified_base 18: mod_base = OTHER; note = 2'O-methyl-nucleotide
  modified_base 19: mod_base = OTHER; note = 2'O-methyl-nucleotide phosphorothioate
  modified_base 20: mod_base = OTHER; note = 2'O-methyl-nucleotide phosphorothioate
  modified_base 21: mod_base = OTHER; note = Inverted abasic nucleotide
naagtgtggctcattaggcan

SEQ ID NO: 456 - RNA, 21 nt, synthetic construct
  source 1..21: mol_type = other RNA
  modified_base 1: mod_base = OTHER; note = Vinyl phosphonate 2'O-methyl-nucleotide phosphorothioate
  modified_base 2: mod_base = OTHER; note = 2'fluoro-nucleotide phosphorothioate
  modified_base 3: mod_base = OTHER; note = 2'O-methyl-nucleotide phosphorothioate
  modified_base 4: mod_base = OTHER; note = 2'fluoro-nucleotide
  modified_base 5: mod_base = OTHER; note = 2'O-methyl-nucleotide
  modified_base 6: mod_base = OTHER; note = 2'fluoro-nucleotide
  modified_base 7: mod_base = OTHER; note = 2'O-methyl-nucleotide
  modified_base 8: mod_base = OTHER; note = 2'fluoro-nucleotide
  modified_base 9: mod_base = OTHER; note = 2'O-methyl-nucleotide
  modified_base 10: mod_base = OTHER; note = 2'fluoro-nucleotide
  modified_base 11: mod_base = OTHER; note = 2'O-methyl-nucleotide
  modified_base 12: mod_base = OTHER; note = 2'fluoro-nucleotide
  modified_base 13: mod_base = OTHER; note = 2'O-methyl-nucleotide
  modified_base 14: mod_base = OTHER; note = 2'fluoro-nucleotide
  modified_base 15: mod_base = OTHER; note = 2'O-methyl-nucleotide
  modified_base 16: mod_base = OTHER; note = 2'fluoro-nucleotide
  modified_base 17: mod_base = OTHER; note = 2'O-methyl-nucleotide
  modified_base 18: mod_base = OTHER; note = 2'fluoro-nucleotide
  modified_base 19: mod_base = OTHER; note = 2'O-methyl-nucleotide
  modified_base 20: mod_base = OTHER; note = 2'O-methyl-nucleotide phosphorothioate
  modified_base 21: mod_base = OTHER; note = 2'O-methyl-nucleotide
tgcctaatgagccacacttgg

SEQ ID NO: 457 - RNA, 19 nt, synthetic construct
  source 1..19: mol_type = other RNA
  modified_base 1: mod_base = OTHER; note = 2'O-methyl-nucleotide phosphorothioate
  modified_base 2: mod_base = OTHER; note = 2'O-methyl-nucleotide phosphorothioate
  modified_base 3: mod_base = OTHER; note = 2'O-methyl-nucleotide
  modified_base 4: mod_base = OTHER; note = 2'O-methyl-nucleotide
  modified_base 5: mod_base = OTHER; note = 2'fluoro-nucleotide
  modified_base 6: mod_base = OTHER; note = 2'O-methyl-nucleotide
  modified_base 7: mod_base = OTHER; note = 2'fluoro-nucleotide
  modified_base 8: mod_base = OTHER; note = 2'fluoro-nucleotide
  modified_base 9: mod_base = OTHER; note = 2'fluoro-nucleotide
  modified_base 10: mod_base = OTHER; note = 2'O-methyl-nucleotide
  modified_base 11: mod_base = OTHER; note = 2'O-methyl-nucleotide
  modified_base 12: mod_base = OTHER; note = 2'O-methyl-nucleotide
  modified_base 13: mod_base = OTHER; note = 2'O-methyl-nucleotide
  modified_base 14: mod_base = OTHER; note = 2'O-methyl-nucleotide
  modified_base 15: mod_base = OTHER; note = 2'O-methyl-nucleotide
  modified_base 16: mod_base = OTHER; note = 2'O-methyl-nucleotide
  modified_base 17: mod_base = OTHER; note = 2'O-methyl-nucleotide phosphorothioate
  modified_base 18: mod_base = OTHER; note = 2'O-methyl-nucleotide phosphorothioate
  modified_base 19: mod_base = OTHER; note = 2'O-methyl-nucleotide
aagtgtggctcattaggca

SEQ ID NO: 458 - RNA, 21 nt, synthetic construct
  source 1..21: mol_type = other RNA
  modified_base 1: mod_base = OTHER; note = Vinyl phosphonate 2'O-methyl-nucleotide phosphorothioate
  modified_base 2: mod_base = OTHER; note = 2'fluoro-nucleotide phosphorothioate
  modified_base 3: mod_base = OTHER; note = 2'O-methyl-nucleotide
  modified_base 4: mod_base = OTHER; note = 2'O-methyl-nucleotide
  modified_base 5: mod_base = OTHER; note = 2'O-methyl-nucleotide
  modified_base 6: mod_base = OTHER; note = 2'fluoro-nucleotide
  modified_base 7: mod_base = OTHER; note = 2'O-methyl-nucleotide
  modified_base 8: mod_base = OTHER; note = 2'fluoro-nucleotide
  modified_base 9: mod_base = OTHER; note = 2'fluoro-nucleotide
  modified_base 10: mod_base = OTHER; note = 2'O-methyl-nucleotide
  modified_base 11: mod_base = OTHER; note = 2'O-methyl-nucleotide
  modified_base 12: mod_base = OTHER; note = 2'O-methyl-nucleotide
  modified_base 13: mod_base = OTHER; note = 2'O-methyl-nucleotide
  modified_base 14: mod_base = OTHER; note = 2'fluoro-nucleotide
  modified_base 15: mod_base = OTHER; note = 2'O-methyl-nucleotide
  modified_base 16: mod_base = OTHER; note = 2'fluoro-nucleotide
  modified_base 17: mod_base = OTHER; note = 2'O-methyl-nucleotide
  modified_base 18: mod_base = OTHER; note = 2'O-methyl-nucleotide
  modified_base 19: mod_base = OTHER; note = 2'O-methyl-nucleotide phosphorothioate
  modified_base 20: mod_base = OTHER; note = 2'O-methyl-nucleotide phosphorothioate
  modified_base 21: mod_base = OTHER; note = 2'O-methyl-nucleotide
tgcctaatgagccacacttgg

SEQ ID NO: 459 - RNA, 21 nt, synthetic construct
  source 1..21: mol_type = other RNA
  modified_base 1: mod_base = OTHER; note = 2'O-methyl-nucleotide phosphorothioate
  modified_base 2: mod_base = OTHER; note = 2'O-methyl-nucleotide phosphorothioate
  modified_base 3: mod_base = OTHER; note = 2'O-methyl-nucleotide
  modified_base 4: mod_base = OTHER; note = 2'O-methyl-nucleotide
  modified_base 5: mod_base = OTHER; note = 2'O-methyl-nucleotide
  modified_base 6: mod_base = OTHER; note = 2'O-methyl-nucleotide
  modified_base 7: mod_base = OTHER; note = 2'fluoro-nucleotide
  modified_base 8: mod_base = OTHER; note = 2'O-methyl-nucleotide
  modified_base 9: mod_base = OTHER; note = 2'fluoro-nucleotide
  modified_base 10: mod_base = OTHER; note = 2'fluoro-nucleotide
  modified_base 11: mod_base = OTHER; note = 2'fluoro-nucleotide
  modified_base 12: mod_base = OTHER; note = 2'O-methyl-nucleotide
  modified_base 13: mod_base = OTHER; note = 2'O-methyl-nucleotide
  modified_base 14: mod_base = OTHER; note = 2'O-methyl-nucleotide
  modified_base 15: mod_base = OTHER; note = 2'O-methyl-nucleotide
  modified_base 16: mod_base = OTHER; note = 2'O-methyl-nucleotide
  modified_base 17: mod_base = OTHER; note = 2'O-methyl-nucleotide
  modified_base 18: mod_base = OTHER; note = 2'O-methyl-nucleotide
  modified_base 19: mod_base = OTHER; note = 2'O-methyl-nucleotide phosphorothioate
  modified_base 20: mod_base = OTHER; note = 2'O-methyl-nucleotide phosphorothioate
  modified_base 21: mod_base = OTHER; note = 2'O-methyl-nucleotide
ccaagtgtggctcattaggca

SEQ ID NO: 460 - RNA, 23 nt, synthetic construct
  source 1..23: mol_type = other RNA
  modified_base 1: mod_base = OTHER; note = Vinyl phosphonate 2'O-methyl-nucleotide phosphorothioate
  modified_base 2: mod_base = OTHER; note = 2'fluoro-nucleotide phosphorothioate
  modified_base 3: mod_base = OTHER; note = 2'O-methyl-nucleotide
  modified_base 4: mod_base = OTHER; note = 2'O-methyl-nucleotide
  modified_base 5: mod_base = OTHER; note = 2'O-methyl-nucleotide
  modified_base 6: mod_base = OTHER; note = 2'fluoro-nucleotide
  modified_base 7: mod_base = OTHER; note = 2'O-methyl-nucleotide
  modified_base 8: mod_base = OTHER; note = 2'fluoro-nucleotide
  modified_base 9: mod_base = OTHER; note = 2'fluoro-nucleotide
  modified_base 10: mod_base = OTHER; note = 2'O-methyl-nucleotide
  modified_base 11: mod_base = OTHER; note = 2'O-methyl-nucleotide
  modified_base 12: mod_base = OTHER; note = 2'O-methyl-nucleotide
  modified_base 13: mod_base = OTHER; note = 2'O-methyl-nucleotide
  modified_base 14: mod_base = OTHER; note = 2'fluoro-nucleotide
  modified_base 15: mod_base = OTHER; note = 2'O-methyl-nucleotide
  modified_base 16: mod_base = OTHER; note = 2'fluoro-nucleotide
  modified_base 17: mod_base = OTHER; note = 2'O-methyl-nucleotide
  modified_base 18: mod_base = OTHER; note = 2'O-methyl-nucleotide
  modified_base 19: mod_base = OTHER; note = 2'O-methyl-nucleotide
  modified_base 20: mod_base = OTHER; note = 2'O-methyl-nucleotide
  modified_base 21: mod_base = OTHER; note = 2'O-methyl-nucleotide phosphorothioate
  modified_base 22: mod_base = OTHER; note = 2'O-methyl-nucleotide phosphorothioate
  modified_base 23: mod_base = OTHER; note = 2'O-methyl-nucleotide
tgcctaatgagccacacttggag

SEQ ID NO: 461 - RNA, 21 nt, synthetic construct
  source 1..21: mol_type = other RNA
  modified_base 1: mod_base = OTHER; note = 2'O-methyl-nucleotide phosphorothioate
  modified_base 2: mod_base = OTHER; note = 2'O-methyl-nucleotide phosphorothioate
  modified_base 3: mod_base = OTHER; note = 2'O-methyl-nucleotide
  modified_base 4: mod_base = OTHER; note = 2'O-methyl-nucleotide
  modified_base 5: mod_base = OTHER; note = 2'O-methyl-nucleotide
  modified_base 6: mod_base = OTHER; note = 2'O-methyl-nucleotide
  modified_base 7: mod_base = OTHER; note = 2'O-methyl-nucleotide
  modified_base 8: mod_base = OTHER; note = 2'O-methyl-nucleotide
  modified_base 9: mod_base = OTHER; note = 2'fluoro-nucleotide
  modified_base 10: mod_base = OTHER; note = 2'O-methyl-nucleotide
  modified_base 11: mod_base = OTHER; note = 2'fluoro-nucleotide
  modified_base 12: mod_base = OTHER; note = 2'fluoro-nucleotide
  modified_base 13: mod_base = OTHER; note = 2'fluoro-nucleotide
  modified_base 14: mod_base = OTHER; note = 2'fluoro-nucleotide
  modified_base 15: mod_base = OTHER; note = 2'O-methyl-nucleotide
  modified_base 16: mod_base = OTHER; note = 2'O-methyl-nucleotide
  modified_base 17: mod_base = OTHER; note = 2'O-methyl-nucleotide
  modified_base 18: mod_base = OTHER; note = 2'O-methyl-nucleotide
  modified_base 19: mod_base = OTHER; note = 2'O-methyl-nucleotide
  modified_base 20: mod_base = OTHER; note = 2'O-methyl-nucleotide phosphorothioate
  modified_base 21: mod_base = OTHER; note = Inverted abasic nucleotide
caagtgtggctcattaggcan

SEQ ID NO: 462 - RNA, 23 nt, synthetic construct
  source 1..23: mol_type = other RNA
  modified_base 1: mod_base = OTHER; note = Vinyl phosphonate 2'O-methyl-nucleotide phosphorothioate
  modified_base 2: mod_base = OTHER; note = 2'fluoro-nucleotide phosphorothioate
  modified_base 3: mod_base = OTHER; note = 2'O-methyl-nucleotide
  modified_base 4: mod_base = OTHER; note = 2'O-methyl-nucleotide
  modified_base 5: mod_base = OTHER; note = 2'O-methyl-nucleotide
  modified_base 6: mod_base = OTHER; note = 2'O-methyl-nucleotide
  modified_base 7: mod_base = OTHER; note = 2'fluoro-nucleotide
  modified_base 8: mod_base = OTHER; note = 2'O-methyl-nucleotide
  modified_base 9: mod_base = OTHER; note = 2'O-methyl-nucleotide
  modified_base 10: mod_base = OTHER; note = 2'O-methyl-nucleotide
  modified_base 11: mod_base = OTHER; note = 2'O-methyl-nucleotide
  modified_base 12: mod_base = OTHER; note = 2'fluoro-nucleotide
  modified_base 13: mod_base = OTHER; note = 2'O-methyl-nucleotide
  modified_base 14: mod_base = OTHER; note = 2'fluoro-nucleotide
  modified_base 15: mod_base = OTHER; note = 2'O-methyl-nucleotide
  modified_base 16: mod_base = OTHER; note = 2'O-methyl-nucleotide
  modified_base 17: mod_base = OTHER; note = 2'O-methyl-nucleotide
  modified_base 18: mod_base = OTHER; note = 2'O-methyl-nucleotide
  modified_base 19: mod_base = OTHER; note = 2'O-methyl-nucleotide
  modified_base 20: mod_base = OTHER; note = 2'O-methyl-nucleotide
  modified_base 21: mod_base = OTHER; note = 2'O-methyl-nucleotide phosphorothioate
  modified_base 22: mod_base = OTHER; note = 2'O-methyl-nucleotide phosphorothioate
  modified_base 23: mod_base = OTHER; note = 2'O-methyl-nucleotide
tgcctaatgagccacacttggtt

SEQ ID NO: 463 - RNA, 22 nt, synthetic construct
  source 1..22: mol_type = other RNA
  modified_base 1: mod_base = OTHER; note = Inverted abasic nucleotide phosphorothioate
  modified_base 2: mod_base = OTHER; note = 2'O-methyl-nucleotide phosphorothioate
  modified_base 3: mod_base = OTHER; note = 2'O-methyl-nucleotide
  modified_base 4: mod_base = OTHER; note = 2'O-methyl-nucleotide
  modified_base 5: mod_base = OTHER; note = 2'O-methyl-nucleotide
  modified_base 6: mod_base = OTHER; note = 2'fluoro-nucleotide
  modified_base 7: mod_base = OTHER; note = 2'O-methyl-nucleotide
  modified_base 8: mod_base = OTHER; note = 2'fluoro-nucleotide
  modified_base 9: mod_base = OTHER; note = 2'fluoro-nucleotide
  modified_base 10: mod_base = OTHER; note = 2'fluoro-nucleotide
  modified_base 11: mod_base = OTHER; note = 2'O-methyl-nucleotide
  modified_base 12: mod_base = OTHER; note = 2'O-methyl-nucleotide
  modified_base 13: mod_base = OTHER; note = 2'O-methyl-nucleotide
  modified_base 14: mod_base = OTHER; note = 2'O-methyl-nucleotide
  modified_base 15: mod_base = OTHER; note = 2'O-methyl-nucleotide
  modified_base 16: mod_base = OTHER; note = 2'O-methyl-nucleotide
  modified_base 17: mod_base = OTHER; note = 2'O-methyl-nucleotide
  modified_base 18: mod_base = OTHER; note = 2'O-methyl-nucleotide
  modified_base 19: mod_base = OTHER; note = 2'O-methyl-nucleotide
  modified_base 20: mod_base = OTHER; note = 2'O-methyl-nucleotide phosphorothioate
  modified_base 21: mod_base = OTHER; note = 2'O-methyl-nucleotide phosphorothioate
  modified_base 22: mod_base = OTHER; note = 2'O-methyl-nucleotide
naagtgtggctcattaggcaac

SEQ ID NO: 464 - RNA, 21 nt, synthetic construct
  source 1..21: mol_type = other RNA
  modified_base 1: mod_base = OTHER; note = Vinyl phosphonate 2'O-methyl-nucleotide phosphorothioate
  modified_base 2: mod_base = OTHER; note = 2'fluoro-nucleotide phosphorothioate
  modified_base 3: mod_base = OTHER; note = 2'O-methyl-nucleotide
  modified_base 4: mod_base = OTHER; note = 2'O-methyl-nucleotide
  modified_base 5: mod_base = OTHER; note = 2'O-methyl-nucleotide
  modified_base 6: mod_base = OTHER; note = 2'fluoro-nucleotide
  modified_base 7: mod_base = OTHER; note = 2'O-methyl-nucleotide
  modified_base 8: mod_base = OTHER; note = 2'O-methyl-nucleotide
  modified_base 9: mod_base = OTHER; note = 2'O-methyl-nucleotide
  modified_base 10: mod_base = OTHER; note = 2'O-methyl-nucleotide
  modified_base 11: mod_base = OTHER; note = 2'O-methyl-nucleotide
  modified_base 12: mod_base = OTHER; note = 2'O-methyl-nucleotide
  modified_base 13: mod_base = OTHER; note = 2'O-methyl-nucleotide
  modified_base 14: mod_base = OTHER; note = 2'fluoro-nucleotide
  modified_base 15: mod_base = OTHER; note = 2'O-methyl-nucleotide
  modified_base 16: mod_base = OTHER; note = 2'fluoro-nucleotide
  modified_base 17: mod_base = OTHER; note = 2'O-methyl-nucleotide
  modified_base 18: mod_base = OTHER; note = 2'O-methyl-nucleotide
  modified_base 19: mod_base = OTHER; note = 2'O-methyl-nucleotide phosphorothioate
  modified_base 20: mod_base = OTHER; note = 2'O-methyl-nucleotide phosphorothioate
  modified_base 21: mod_base = OTHER; note = 2'O-methyl-nucleotide
tgcctaatgagccacacttgg

SEQ ID NO: 465 - RNA, 23 nt, synthetic construct
  source 1..23: mol_type = other RNA
  modified_base 1: mod_base = OTHER; note = Inverted abasic nucleotide phosphorothioate
  modified_base 2: mod_base = OTHER; note = 2'O-methyl-nucleotide phosphorothioate
  modified_base 3: mod_base = OTHER; note = 2'O-methyl-nucleotide
  modified_base 4: mod_base = OTHER; note = 2'O-methyl-nucleotide
  modified_base 5: mod_base = OTHER; note = 2'O-methyl-nucleotide
  modified_base 6: mod_base = OTHER; note = 2'O-methyl-nucleotide
  modified_base 7: mod_base = OTHER; note = 2'O-methyl-nucleotide
  modified_base 8: mod_base = OTHER; note = 2'O-methyl-nucleotide
  modified_base 9: mod_base = OTHER; note = 2'O-methyl-nucleotide
  modified_base 10: mod_base = OTHER; note = 2'fluoro-nucleotide
  modified_base 11: mod_base = OTHER; note = 2'fluoro-nucleotide
  modified_base 12: mod_base = OTHER; note = 2'fluoro-nucleotide
  modified_base 13: mod_base = OTHER; note = 2'O-methyl-nucleotide
  modified_base 14: mod_base = OTHER; note = 2'O-methyl-nucleotide
  modified_base 15: mod_base = OTHER; note = 2'O-methyl-nucleotide
  modified_base 16: mod_base = OTHER; note = 2'O-methyl-nucleotide
  modified_base 17: mod_base = OTHER; note = 2'O-methyl-nucleotide
  modified_base 18: mod_base = OTHER; note = 2'O-methyl-nucleotide
  modified_base 19: mod_base = OTHER; note = 2'O-methyl-nucleotide
  modified_base 20: mod_base = OTHER; note = 2'O-methyl-nucleotide
  modified_base 21: mod_base = OTHER; note = 2'O-methyl-nucleotide phosphorothioate
  modified_base 22: mod_base = OTHER; note = 2'O-methyl-nucleotide phosphorothioate
  modified_base 23: mod_base = OTHER; note = Inverted abasic nucleotide
nccaagtgtggctcattaggcan

SEQ ID NO: 466 - RNA, 21 nt, synthetic construct
  source 1..21: mol_type = other RNA
  modified_base 1: mod_base = OTHER; note = Vinyl phosphonate 2'O-methyl-nucleotide phosphorothioate
  modified_base 2: mod_base = OTHER; note = 2'fluoro-nucleotide phosphorothioate
  modified_base 3: mod_base = OTHER; note = 2'O-methyl-nucleotide phosphorothioate
  modified_base 4: mod_base = OTHER; note = 2'fluoro-nucleotide
  modified_base 5: mod_base = OTHER; note = 2'O-methyl-nucleotide
  modified_base 6: mod_base = OTHER; note = 2'fluoro-nucleotide
  modified_base 7: mod_base = OTHER; note = 2'O-methyl-nucleotide
  modified_base 8: mod_base = OTHER; note = 2'fluoro-nucleotide
  modified_base 9: mod_base = OTHER; note = 2'O-methyl-nucleotide
  modified_base 10: mod_base = OTHER; note = 2'fluoro-nucleotide
  modified_base 11: mod_base = OTHER; note = 2'O-methyl-nucleotide
  modified_base 12: mod_base = OTHER; note = 2'fluoro-nucleotide
  modified_base 13: mod_base = OTHER; note = 2'O-methyl-nucleotide
  modified_base 14: mod_base = OTHER; note = 2'fluoro-nucleotide
  modified_base 15: mod_base = OTHER; note = 2'O-methyl-nucleotide
  modified_base 16: mod_base = OTHER; note = 2'fluoro-nucleotide
  modified_base 17: mod_base = OTHER; note = 2'O-methyl-nucleotide
  modified_base 18: mod_base = OTHER; note = 2'fluoro-nucleotide
  modified_base 19: mod_base = OTHER; note = 2'O-methyl-nucleotide
  modified_base 20: mod_base = OTHER; note = 2'O-methyl-nucleotide phosphorothioate
  modified_base 21: mod_base = OTHER; note = 2'O-methyl-nucleotide
tgcctaatgagccacacttgg

SEQ ID NO: 467 - RNA, 21 nt, synthetic construct
  source 1..21: mol_type = other RNA
  modified_base 1: mod_base = OTHER; note = Inverted abasic nucleotide phosphorothioate
  modified_base 2: mod_base = OTHER; note = 2'O-methyl-nucleotide phosphorothioate
  modified_base 3: mod_base = OTHER; note = 2'O-methyl-nucleotide
  modified_base 4: mod_base = OTHER; note = 2'O-methyl-nucleotide
  modified_base 5: mod_base = OTHER; note = 2'O-methyl-nucleotide
  modified_base 6: mod_base = OTHER; note = 2'O-methyl-nucleotide
  modified_base 7: mod_base = OTHER; note = 2'O-methyl-nucleotide
  modified_base 8: mod_base = OTHER; note = 2'fluoro-nucleotide
  modified_base 9: mod_base = OTHER; note = 2'fluoro-nucleotide
  modified_base 10: mod_base = OTHER; note = 2'fluoro-nucleotide
  modified_base 11: mod_base = OTHER; note = 2'O-methyl-nucleotide
  modified_base 12: mod_base = OTHER; note = 2'O-methyl-nucleotide
  modified_base 13: mod_base = OTHER; note = 2'O-methyl-nucleotide
  modified_base 14: mod_base = OTHER; note = 2'O-methyl-nucleotide
  modified_base 15: mod_base = OTHER; note = 2'O-methyl-nucleotide
  modified_base 16: mod_base = OTHER; note = 2'O-methyl-nucleotide
  modified_base 17: mod_base = OTHER; note = 2'O-methyl-nucleotide
  modified_base 18: mod_base = OTHER; note = 2'O-methyl-nucleotide
  modified_base 19: mod_base = OTHER; note = 2'O-methyl-nucleotide phosphorothioate
  modified_base 20: mod_base = OTHER; note = 2'O-methyl-nucleotide phosphorothioate
  modified_base 21: mod_base = OTHER; note = Inverted abasic nucleotide
naagtgtggctcattaggcan

SEQ ID NO: 468 - RNA, 23 nt, synthetic construct
  source 1..23: mol_type = other RNA
  modified_base 1: mod_base = OTHER; note = Vinyl phosphonate 2'O-methyl-nucleotide phosphorothioate
  modified_base 2: mod_base = OTHER; note = 2'fluoro-nucleotide phosphorothioate
  modified_base 3: mod_base = OTHER; note = 2'O-methyl-nucleotide
  modified_base 4: mod_base = OTHER; note = 2'O-methyl-nucleotide
  modified_base 5: mod_base = OTHER; note = 2'O-methyl-nucleotide
  modified_base 6: mod_base = OTHER; note = 2'fluoro-nucleotide
  modified_base 7: mod_base = OTHER; note = 2'O-methyl-nucleotide
  modified_base 8: mod_base = OTHER; note = 2'fluoro-nucleotide
  modified_base 9: mod_base = OTHER; note = 2'fluoro-nucleotide
  modified_base 10: mod_base = OTHER; note = 2'O-methyl-nucleotide
  modified_base 11: mod_base = OTHER; note = 2'O-methyl-nucleotide
  modified_base 12: mod_base = OTHER; note = 2'O-methyl-nucleotide
  modified_base 13: mod_base = OTHER; note = 2'O-methyl-nucleotide
  modified_base 14: mod_base = OTHER; note = 2'fluoro-nucleotide
  modified_base 15: mod_base = OTHER; note = 2'O-methyl-nucleotide
  modified_base 16: mod_base = OTHER; note = 2'fluoro-nucleotide
  modified_base 17: mod_base = OTHER; note = 2'O-methyl-nucleotide
  modified_base 18: mod_base = OTHER; note = 2'O-methyl-nucleotide
  modified_base 19: mod_base = OTHER; note = 2'O-methyl-nucleotide
  modified_base 20: mod_base = OTHER; note = 2'O-methyl-nucleotide
  modified_base 21: mod_base = OTHER; note = 2'O-methyl-nucleotide phosphorothioate
  modified_base 22: mod_base = OTHER; note = 2'O-methyl-nucleotide phosphorothioate
  modified_base 23: mod_base = OTHER; note = 2'O-methyl-nucleotide
tgcctaatgagccacacttggag

SEQ ID NO: 469 - RNA, 21 nt, synthetic construct
  source 1..21: mol_type = other RNA
  modified_base 1: mod_base = OTHER; note = 2'O-methyl-nucleotide phosphorothioate
  modified_base 2: mod_base = OTHER; note = 2'O-methyl-nucleotide phosphorothioate
  modified_base 3: mod_base = OTHER; note = 2'O-methyl-nucleotide
  modified_base 4: mod_base = OTHER; note = 2'O-methyl-nucleotide
  modified_base 5: mod_base = OTHER; note = 2'O-methyl-nucleotide
  modified_base 6: mod_base = OTHER; note = 2'O-methyl-nucleotide
  modified_base 7: mod_base = OTHER; note = 2'fluoro-nucleotide
  modified_base 8: mod_base = OTHER; note = 2'O-methyl-nucleotide
  modified_base 9: mod_base = OTHER; note = 2'fluoro-nucleotide
  modified_base 10: mod_base = OTHER; note = 2'fluoro-nucleotide
  modified_base 11: mod_base = OTHER; note = 2'fluoro-nucleotide
  modified_base 12: mod_base = OTHER; note = 2'O-methyl-nucleotide
  modified_base 13: mod_base = OTHER; note = 2'O-methyl-nucleotide
  modified_base 14: mod_base = OTHER; note = 2'O-methyl-nucleotide
  modified_base 15: mod_base = OTHER; note = 2'O-methyl-nucleotide
  modified_base 16: mod_base = OTHER; note = 2'O-methyl-nucleotide
  modified_base 17: mod_base = OTHER; note = 2'O-methyl-nucleotide
  modified_base 18: mod_base = OTHER; note = 2'O-methyl-nucleotide
  modified_base 19: mod_base = OTHER; note = 2'O-methyl-nucleotide phosphorothioate
  modified_base 20: mod_base = OTHER; note = 2'O-methyl-nucleotide phosphorothioate
  modified_base 21: mod_base = OTHER; note = 2'O-methyl-nucleotide
ccaagtgtggctcattaggca

SEQ ID NO: 470 - RNA, 21 nt, synthetic construct
  source 1..21: mol_type = other RNA
  modified_base 1: mod_base = OTHER; note = Vinyl phosphonate 2'O-methyl-nucleotide phosphorothioate
  modified_base 2: mod_base = OTHER; note = 2'fluoro-nucleotide phosphorothioate
  modified_base 3: mod_base = OTHER; note = 2'O-methyl-nucleotide phosphorothioate
  modified_base 4: mod_base = OTHER; note = 2'fluoro-nucleotide
  modified_base 5: mod_base = OTHER; note = 2'O-methyl-nucleotide
  modified_base 6: mod_base = OTHER; note = 2'fluoro-nucleotide
  modified_base 7: mod_base = OTHER; note = 2'O-methyl-nucleotide
  modified_base 8: mod_base = OTHER; note = 2'fluoro-nucleotide
  modified_base 9: mod_base = OTHER; note = 2'O-methyl-nucleotide
  modified_base 10: mod_base = OTHER; note = 2'fluoro-nucleotide
  modified_base 11: mod_base = OTHER; note = 2'O-methyl-nucleotide
  modified_base 12: mod_base = OTHER; note = 2'fluoro-nucleotide
  modified_base 13: mod_base = OTHER; note = 2'O-methyl-nucleotide
  modified_base 14: mod_base = OTHER; note = 2'fluoro-nucleotide
  modified_base 15: mod_base = OTHER; note = 2'O-methyl-nucleotide
  modified_base 16: mod_base = OTHER; note = 2'fluoro-nucleotide
  modified_base 17: mod_base = OTHER; note = 2'O-methyl-nucleotide
  modified_base 18: mod_base = OTHER; note = 2'fluoro-nucleotide
  modified_base 19: mod_base = OTHER; note = 2'O-methyl-nucleotide
  modified_base 20: mod_base = OTHER; note = 2'O-methyl-nucleotide phosphorothioate
  modified_base 21: mod_base = OTHER; note = 2'O-methyl-nucleotide
tgcctaatgagccacacttgg

SEQ ID NO: 471 - RNA, 21 nt, synthetic construct
  source 1..21: mol_type = other RNA
  modified_base 1: mod_base = OTHER; note = Inverted abasic nucleotide phosphorothioate
  modified_base 2: mod_base = OTHER; note = 2'O-methyl-nucleotide phosphorothioate
  modified_base 3: mod_base = OTHER; note = 2'O-methyl-nucleotide
  modified_base 4: mod_base = OTHER; note = 2'O-methyl-nucleotide
  modified_base 5: mod_base = OTHER; note = 2'O-methyl-nucleotide
  modified_base 6: mod_base = OTHER; note = 2'O-methyl-nucleotide
  modified_base 7: mod_base = OTHER; note = 2'O-methyl-nucleotide
  modified_base 8: mod_base = OTHER; note = 2'fluoro-nucleotide
  modified_base 9: mod_base = OTHER; note = 2'fluoro-nucleotide
  modified_base 10: mod_base = OTHER; note = 2'fluoro-nucleotide
  modified_base 11: mod_base = OTHER; note = 2'O-methyl-nucleotide
  modified_base 12: mod_base = OTHER; note = 2'O-methyl-nucleotide
  modified_base 13: mod_base = OTHER; note = 2'O-methyl-nucleotide
  modified_base 14: mod_base = OTHER; note = 2'O-methyl-nucleotide
  modified_base 15: mod_base = OTHER; note = 2'O-methyl-nucleotide
  modified_base 16: mod_base = OTHER; note = 2'O-methyl-nucleotide
  modified_base 17: mod_base = OTHER; note = 2'O-methyl-nucleotide
  modified_base 18: mod_base = OTHER; note = 2'O-methyl-nucleotide
  modified_base 19: mod_base = OTHER; note = 2'O-methyl-nucleotide phosphorothioate
  modified_base 20: mod_base = OTHER; note = 2'O-methyl-nucleotide phosphorothioate
  modified_base 21: mod_base = OTHER; note = Inverted abasic nucleotide
naagtgtggctcattaggcan

SEQ ID NO: 472 - RNA, 21 nt, synthetic construct
  source 1..21: mol_type = other RNA
  modified_base 1: mod_base = OTHER; note = Vinyl phosphonate 2'O-methyl-nucleotide phosphorothioate
  modified_base 2: mod_base = OTHER; note = 2'fluoro-nucleotide phosphorothioate
  modified_base 3: mod_base = OTHER; note = 2'O-methyl-nucleotide
  modified_base 4: mod_base = OTHER; note = 2'O-methyl-nucleotide
  modified_base 5: mod_base = OTHER; note = 2'O-methyl-nucleotide
  modified_base 6: mod_base = OTHER; note = 2'fluoro-nucleotide
  modified_base 7: mod_base = OTHER; note = 2'O-methyl-nucleotide
  modified_base 8: mod_base = OTHER; note = 2'fluoro-nucleotide
  modified_base 9: mod_base = OTHER; note = 2'fluoro-nucleotide
  modified_base 10: mod_base = OTHER; note = 2'O-methyl-nucleotide
  modified_base 11: mod_base = OTHER; note = 2'O-methyl-nucleotide
  modified_base 12: mod_base = OTHER; note = 2'O-methyl-nucleotide
  modified_base 13: mod_base = OTHER; note = 2'O-methyl-nucleotide
  modified_base 14: mod_base = OTHER; note = 2'fluoro-nucleotide
  modified_base 15: mod_base = OTHER; note = 2'O-methyl-nucleotide
  modified_base 16: mod_base = OTHER; note = 2'fluoro-nucleotide
  modified_base 17: mod_base = OTHER; note = 2'O-methyl-nucleotide
  modified_base 18: mod_base = OTHER; note = 2'O-methyl-nucleotide
  modified_base 19: mod_base = OTHER; note = 2'O-methyl-nucleotide phosphorothioate
  modified_base 20: mod_base = OTHER; note = 2'O-methyl-nucleotide phosphorothioate
  modified_base 21: mod_base = OTHER; note = 2'O-methyl-nucleotide
tgcctaatgagccacacttgg

SEQ ID NO: 473 - RNA, 19 nt, synthetic construct
  source 1..19: mol_type = other RNA
  modified_base 1: mod_base = OTHER; note = 2'O-methyl-nucleotide phosphorothioate
  modified_base 2: mod_base = OTHER; note = 2'O-methyl-nucleotide phosphorothioate
  modified_base 3: mod_base = OTHER; note = 2'O-methyl-nucleotide
  modified_base 4: mod_base = OTHER; note = 2'O-methyl-nucleotide
  modified_base 5: mod_base = OTHER; note = 2'fluoro-nucleotide
  modified_base 6: mod_base = OTHER; note = 2'O-methyl-nucleotide
  modified_base 7: mod_base = OTHER; note = 2'fluoro-nucleotide
  modified_base 8: mod_base = OTHER; note = 2'fluoro-nucleotide
  modified_base 9: mod_base = OTHER; note = 2'fluoro-nucleotide
  modified_base 10: mod_base = OTHER; note = 2'O-methyl-nucleotide
  modified_base 11: mod_base = OTHER; note = 2'O-methyl-nucleotide
  modified_base 12: mod_base = OTHER; note = 2'O-methyl-nucleotide
  modified_base 13: mod_base = OTHER; note = 2'O-methyl-nucleotide
  modified_base 14: mod_base = OTHER; note = 2'O-methyl-nucleotide
  modified_base 15: mod_base = OTHER; note = 2'O-methyl-nucleotide
  modified_base 16: mod_base = OTHER; note = 2'O-methyl-nucleotide
  modified_base 17: mod_base = OTHER; note = 2'O-methyl-nucleotide phosphorothioate
  modified_base 18: mod_base = OTHER; note = 2'O-methyl-nucleotide phosphorothioate
  modified_base 19: mod_base = OTHER; note = 2'O-methyl-nucleotide
aagtgtggctcattaggca

SEQ ID NO: 474 - RNA, 21 nt, synthetic construct
  source 1..21: mol_type = other RNA
  modified_base 1: mod_base = OTHER; note = Vinyl phosphonate 2'O-methyl-nucleotide phosphorothioate
  modified_base 2: mod_base = OTHER; note = 2'fluoro-nucleotide phosphorothioate
  modified_base 3: mod_base = OTHER; note = 2'O-methyl-nucleotide phosphorothioate
  modified_base 4: mod_base = OTHER; note = 2'fluoro-nucleotide
  modified_base 5: mod_base = OTHER; note = 2'O-methyl-nucleotide
  modified_base 6: mod_base = OTHER; note = 2'fluoro-nucleotide
  modified_base 7: mod_base = OTHER; note = 2'O-methyl-nucleotide
  modified_base 8: mod_base = OTHER; note = 2'fluoro-nucleotide
  modified_base 9: mod_base = OTHER; note = 2'O-methyl-nucleotide
  modified_base 10: mod_base = OTHER; note = 2'fluoro-nucleotide
  modified_base 11: mod_base = OTHER; note = 2'O-methyl-nucleotide
  modified_base 12: mod_base = OTHER; note = 2'fluoro-nucleotide
  modified_base 13: mod_base = OTHER; note = 2'O-methyl-nucleotide
  modified_base 14: mod_base = OTHER; note = 2'fluoro-nucleotide
  modified_base 15: mod_base = OTHER; note = 2'O-methyl-nucleotide
  modified_base 16: mod_base = OTHER; note = 2'fluoro-nucleotide
  modified_base 17: mod_base = OTHER; note = 2'O-methyl-nucleotide
  modified_base 18: mod_base = OTHER; note = 2'fluoro-nucleotide
  modified_base 19: mod_base = OTHER; note = 2'O-methyl-nucleotide
  modified_base 20: mod_base = OTHER; note = 2'O-methyl-nucleotide phosphorothioate
  modified_base 21: mod_base = OTHER; note = 2'O-methyl-nucleotide
tgcctaatgagccacacttgg

SEQ ID NO: 475 - RNA, 21 nt, synthetic construct
  source 1..21: mol_type = other RNA
  modified_base 1: mod_base = OTHER; note = Inverted abasic nucleotide phosphorothioate
  modified_base 2: mod_base = OTHER; note = 2'O-methyl-nucleotide phosphorothioate
  modified_base 3: mod_base = OTHER; note = 2'O-methyl-nucleotide
  modified_base 4: mod_base = OTHER; note = 2'O-methyl-nucleotide
  modified_base 5: mod_base = OTHER; note = 2'O-methyl-nucleotide
  modified_base 6: mod_base = OTHER; note = 2'O-methyl-nucleotide
  modified_base 7: mod_base = OTHER; note = 2'O-methyl-nucleotide
  modified_base 8: mod_base = OTHER; note = 2'fluoro-nucleotide
  modified_base 9: mod_base = OTHER; note = 2'fluoro-nucleotide
  modified_base 10: mod_base = OTHER; note = 2'fluoro-nucleotide
  modified_base 11: mod_base = OTHER; note = 2'O-methyl-nucleotide
  modified_base 12: mod_base = OTHER; note = 2'O-methyl-nucleotide
  modified_base 13: mod_base = OTHER; note = 2'O-methyl-nucleotide
  modified_base 14: mod_base = OTHER; note = 2'O-methyl-nucleotide
  modified_base 15: mod_base = OTHER; note = 2'O-methyl-nucleotide
  modified_base 16: mod_base = OTHER; note = 2'O-methyl-nucleotide
  modified_base 17: mod_base = OTHER; note = 2'O-methyl-nucleotide
  modified_base 18: mod_base = OTHER; note = 2'O-methyl-nucleotide
  modified_base 19: mod_base = OTHER; note = 2'O-methyl-nucleotide phosphorothioate
  modified_base 20: mod_base = OTHER; note = 2'O-methyl-nucleotide phosphorothioate
  modified_base 21: mod_base = OTHER; note = Inverted abasic nucleotide
naagtgtggctcattaggcan

SEQ ID NO: 476 - RNA, 23 nt, synthetic construct
  source 1..23: mol_type = other RNA
  modified_base 1: mod_base = OTHER; note = Vinyl phosphonate 2'O-methyl-nucleotide phosphorothioate
  modified_base 2: mod_base = OTHER; note = 2'fluoro-nucleotide phosphorothioate
  modified_base 3: mod_base = OTHER; note = 2'O-methyl-nucleotide
  modified_base 4: mod_base = OTHER; note = 2'O-methyl-nucleotide
  modified_base 5: mod_base = OTHER; note = 2'O-methyl-nucleotide
  modified_base 6: mod_base = OTHER; note = 2'O-methyl-nucleotide
  modified_base 7: mod_base = OTHER; note = 2'fluoro-nucleotide
  modified_base 8: mod_base = OTHER; note = 2'O-methyl-nucleotide
  modified_base 9: mod_base = OTHER; note = 2'O-methyl-nucleotide
  modified_base 10: mod_base = OTHER; note = 2'O-methyl-nucleotide
  modified_base 11: mod_base = OTHER; note = 2'O-methyl-nucleotide
  modified_base 12: mod_base = OTHER; note = 2'fluoro-nucleotide
  modified_base 13: mod_base = OTHER; note = 2'O-methyl-nucleotide
  modified_base 14: mod_base = OTHER; note = 2'fluoro-nucleotide
  modified_base 15: mod_base = OTHER; note = 2'O-methyl-nucleotide
  modified_base 16: mod_base = OTHER; note = 2'O-methyl-nucleotide
  modified_base 17: mod_base = OTHER; note = 2'O-methyl-nucleotide
  modified_base 18: mod_base = OTHER; note = 2'O-methyl-nucleotide
  modified_base 19: mod_base = OTHER; note = 2'O-methyl-nucleotide
  modified_base 20: mod_base = OTHER; note = 2'O-methyl-nucleotide
  modified_base 21: mod_base = OTHER; note = 2'O-methyl-nucleotide phosphorothioate
  modified_base 22: mod_base = OTHER; note = 2'O-methyl-nucleotide phosphorothioate
  modified_base 23: mod_base = OTHER; note = 2'O-methyl-nucleotide
tgcctaatgagccacacttggtt

SEQ ID NO: 477 - RNA, 21 nt, synthetic construct
  source 1..21: mol_type = other RNA
  modified_base 1: mod_base = OTHER; note = 2'O-methyl-nucleotide phosphorothioate
  modified_base 2: mod_base = OTHER; note = 2'O-methyl-nucleotide phosphorothioate
  modified_base 3: mod_base = OTHER; note = 2'O-methyl-nucleotide
  modified_base 4: mod_base = OTHER; note = 2'O-methyl-nucleotide
  modified_base 5: mod_base = OTHER; note = 2'O-methyl-nucleotide
  modified_base 6: mod_base = OTHER; note = 2'O-methyl-nucleotide
  modified_base 7: mod_base = OTHER; note = 2'O-methyl-nucleotide
  modified_base 8: mod_base = OTHER; note = 2'O-methyl-nucleotide
  modified_base 9: mod_base = OTHER; note = 2'fluoro-nucleotide
  modified_base 10: mod_base = OTHER; note = 2'O-methyl-nucleotide
  modified_base 11: mod_base = OTHER; note = 2'fluoro-nucleotide
  modified_base 12: mod_base = OTHER; note = 2'fluoro-nucleotide
  modified_base 13: mod_base = OTHER; note = 2'fluoro-nucleotide
  modified_base 14: mod_base = OTHER; note = 2'fluoro-nucleotide
  modified_base 15: mod_base = OTHER; note = 2'O-methyl-nucleotide
  modified_base 16: mod_base = OTHER; note = 2'O-methyl-nucleotide
  modified_base 17: mod_base = OTHER; note = 2'O-methyl-nucleotide
  modified_base 18: mod_base = OTHER; note = 2'O-methyl-nucleotide
  modified_base 19: mod_base = OTHER; note = 2'O-methyl-nucleotide
  modified_base 20: mod_base = OTHER; note = 2'O-methyl-nucleotide phosphorothioate
  modified_base 21: mod_base = OTHER; note = Inverted abasic nucleotide
caagtgtggctcattaggcan

SEQ ID NO: 478 - RNA, 21 nt, synthetic construct
  source 1..21: mol_type = other RNA
  modified_base 1: mod_base = OTHER; note = Vinyl phosphonate 2'O-methyl-nucleotide phosphorothioate
  modified_base 2: mod_base = OTHER; note = 2'fluoro-nucleotide phosphorothioate
  modified_base 3: mod_base = OTHER; note = 2'O-methyl-nucleotide phosphorothioate
  modified_base 4: mod_base = OTHER; note = 2'fluoro-nucleotide
  modified_base 5: mod_base = OTHER; note = 2'O-methyl-nucleotide
  modified_base 6: mod_base = OTHER; note = 2'fluoro-nucleotide
  modified_base 7: mod_base = OTHER; note = 2'O-methyl-nucleotide
  modified_base 8: mod_base = OTHER; note = 2'fluoro-nucleotide
  modified_base 9: mod_base = OTHER; note = 2'O-methyl-nucleotide
  modified_base 10: mod_base = OTHER; note = 2'fluoro-nucleotide
  modified_base 11: mod_base = OTHER; note = 2'O-methyl-nucleotide
  modified_base 12: mod_base = OTHER; note = 2'fluoro-nucleotide
  modified_base 13: mod_base = OTHER; note = 2'O-methyl-nucleotide
  modified_base 14: mod_base = OTHER; note = 2'fluoro-nucleotide
  modified_base 15: mod_base = OTHER; note = 2'O-methyl-nucleotide
  modified_base 16: mod_base = OTHER; note = 2'fluoro-nucleotide
  modified_base 17: mod_base = OTHER; note = 2'O-methyl-nucleotide
  modified_base 18: mod_base = OTHER; note = 2'fluoro-nucleotide
  modified_base 19: mod_base = OTHER; note = 2'O-methyl-nucleotide
  modified_base 20: mod_base = OTHER; note = 2'O-methyl-nucleotide phosphorothioate
  modified_base 21: mod_base = OTHER; note = 2'O-methyl-nucleotide
tgcctaatgagccacacttgg

SEQ ID NO: 479 - RNA, 23 nt, synthetic construct
  source 1..23: mol_type = other RNA
  modified_base 1: mod_base = OTHER; note = Inverted abasic nucleotide phosphorothioate
  modified_base 2: mod_base = OTHER; note = 2'O-methyl-nucleotide phosphorothioate
  modified_base 3: mod_base = OTHER; note = 2'O-methyl-nucleotide
  modified_base 4: mod_base = OTHER; note = 2'O-methyl-nucleotide
  modified_base 5: mod_base = OTHER; note = 2'O-methyl-nucleotide
  modified_base 6: mod_base = OTHER; note = 2'O-methyl-nucleotide
  modified_base 7: mod_base = OTHER; note = 2'O-methyl-nucleotide
  modified_base 8: mod_base = OTHER; note = 2'O-methyl-nucleotide
  modified_base 9: mod_base = OTHER; note = 2'O-methyl-nucleotide
  modified_base 10: mod_base = OTHER; note = 2'fluoro-nucleotide
  modified_base 11: mod_base = OTHER; note = 2'fluoro-nucleotide
  modified_base 12: mod_base = OTHER; note = 2'fluoro-nucleotide
  modified_base 13: mod_base = OTHER; note = 2'O-methyl-nucleotide
  modified_base 14: mod_base = OTHER; note = 2'O-methyl-nucleotide
  modified_base 15: mod_base = OTHER; note = 2'O-methyl-nucleotide
  modified_base 16: mod_base = OTHER; note = 2'O-methyl-nucleotide
  modified_base 17: mod_base = OTHER; note = 2'O-methyl-nucleotide
  modified_base 18: mod_base = OTHER; note = 2'O-methyl-nucleotide
  modified_base 19: mod_base = OTHER; note = 2'O-methyl-nucleotide
  modified_base 20: mod_base = OTHER; note = 2'O-methyl-nucleotide
  modified_base 21: mod_base = OTHER; note = 2'O-methyl-nucleotide phosphorothioate
  modified_base 22: mod_base = OTHER; note = 2'O-methyl-nucleotide phosphorothioate
  modified_base 23: mod_base = OTHER; note = Inverted abasic nucleotide
nccaagtgtggctcattaggcan

SEQ ID NO: 480 - RNA, 23 nt, synthetic construct
  source 1..23: mol_type = other RNA
  modified_base 1: mod_base = OTHER; note = Vinyl phosphonate 2'O-methyl-nucleotide phosphorothioate
  modified_base 2: mod_base = OTHER; note = 2'fluoro-nucleotide phosphorothioate
  modified_base 3: mod_base = OTHER; note = 2'O-methyl-nucleotide
  modified_base 4: mod_base = OTHER; note = 2'O-methyl-nucleotide
  modified_base 5: mod_base = OTHER; note = 2'O-methyl-nucleotide
  modified_base 6: mod_base = OTHER; note = 2'fluoro-nucleotide
  modified_base 7: mod_base = OTHER; note = 2'O-methyl-nucleotide
  modified_base 8: mod_base = OTHER; note = 2'fluoro-nucleotide
  modified_base 9: mod_base = OTHER; note = 2'fluoro-nucleotide
  modified_base 10: mod_base = OTHER; note = 2'O-methyl-nucleotide
  modified_base 11: mod_base = OTHER; note = 2'O-methyl-nucleotide
  modified_base 12: mod_base = OTHER; note = 2'O-methyl-nucleotide
  modified_base 13: mod_base = OTHER; note = 2'O-methyl-nucleotide
  modified_base 14: mod_base = OTHER; note = 2'fluoro-nucleotide
  modified_base 15: mod_base = OTHER; note = 2'O-methyl-nucleotide
  modified_base 16: mod_base = OTHER; note = 2'fluoro-nucleotide
  modified_base 17: mod_base = OTHER; note = 2'O-methyl-nucleotide
  modified_base 18: mod_base = OTHER; note = 2'O-methyl-nucleotide
  modified_base 19: mod_base = OTHER; note = 2'O-methyl-nucleotide
  modified_base 20: mod_base = OTHER; note = 2'O-methyl-nucleotide
  modified_base 21: mod_base = OTHER; note = 2'O-methyl-nucleotide phosphorothioate
  modified_base 22: mod_base = OTHER; note = 2'O-methyl-nucleotide phosphorothioate
  modified_base 23: mod_base = OTHER; note = 2'O-methyl-nucleotide
tgcctaatgagccacacttggag

SEQ ID NO: 481 - RNA, 23 nt, synthetic construct
  source 1..23: mol_type = other RNA
  modified_base 1: mod_base = OTHER; note = Inverted abasic nucleotide phosphorothioate
  modified_base 2: mod_base = OTHER; note = 2'O-methyl-nucleotide phosphorothioate
  modified_base 3: mod_base = OTHER; note = 2'O-methyl-nucleotide
  modified_base 4: mod_base = OTHER; note = 2'O-methyl-nucleotide
  modified_base 5: mod_base = OTHER; note = 2'O-methyl-nucleotide
  modified_base 6: mod_base = OTHER; note = 2'O-methyl-nucleotide
  modified_base 7: mod_base = OTHER; note = 2'O-methyl-nucleotide
  modified_base 8: mod_base = OTHER; note = 2'O-methyl-nucleotide
  modified_base 9: mod_base = OTHER; note = 2'O-methyl-nucleotide
  modified_base 10: mod_base = OTHER; note = 2'fluoro-nucleotide
  modified_base 11: mod_base = OTHER; note = 2'fluoro-nucleotide
  modified_base 12: mod_base = OTHER; note = 2'fluoro-nucleotide
  modified_base 13: mod_base = OTHER; note = 2'O-methyl-nucleotide
  modified_base 14: mod_base = OTHER; note = 2'O-methyl-nucleotide
  modified_base 15: mod_base = OTHER; note = 2'O-methyl-nucleotide
  modified_base 16: mod_base = OTHER; note = 2'O-methyl-nucleotide
  modified_base 17: mod_base = OTHER; note = 2'O-methyl-nucleotide
  modified_base 18: mod_base = OTHER; note = 2'O-methyl-nucleotide
  modified_base 19: mod_base = OTHER; note = 2'O-methyl-nucleotide
  modified_base 20: mod_base = OTHER; note = 2'O-methyl-nucleotide
  modified_base 21: mod_base = OTHER; note = 2'O-methyl-nucleotide phosphorothioate
  modified_base 22: mod_base = OTHER; note = 2'O-methyl-nucleotide phosphorothioate
  modified_base 23: mod_base = OTHER; note = Inverted abasic nucleotide
nccaagtgtggctcattaggcan

SEQ ID NO: 482 - RNA, 21 nt, synthetic construct
  source 1..21: mol_type = other RNA
  modified_base 1: mod_base = OTHER; note = Vinyl phosphonate 2'O-methyl-nucleotide phosphorothioate
  modified_base 2: mod_base = OTHER; note = 2'fluoro-nucleotide phosphorothioate
  modified_base 3: mod_base = OTHER; note = 2'O-methyl-nucleotide
  modified_base 4: mod_base = OTHER; note = 2'O-methyl-nucleotide
  modified_base 5: mod_base = OTHER; note = 2'O-methyl-nucleotide
  modified_base 6: mod_base = OTHER; note = 2'fluoro-nucleotide
  modified_base 7: mod_base = OTHER; note = 2'O-methyl-nucleotide
  modified_base 8: mod_base = OTHER; note = 2'fluoro-nucleotide
  modified_base 9: mod_base = OTHER; note = 2'fluoro-nucleotide
  modified_base 10: mod_base = OTHER; note = 2'O-methyl-nucleotide
  modified_base 11: mod_base = OTHER; note = 2'O-methyl-nucleotide
  modified_base 12: mod_base = OTHER; note = 2'O-methyl-nucleotide
  modified_base 13: mod_base = OTHER; note = 2'O-methyl-nucleotide
  modified_base 14: mod_base = OTHER; note = 2'fluoro-nucleotide
  modified_base 15: mod_base = OTHER; note = 2'O-methyl-nucleotide
  modified_base 16: mod_base = OTHER; note = 2'fluoro-nucleotide
  modified_base 17: mod_base = OTHER; note = 2'O-methyl-nucleotide
  modified_base 18: mod_base = OTHER; note = 2'O-methyl-nucleotide
  modified_base 19: mod_base = OTHER; note = 2'O-methyl-nucleotide phosphorothioate
  modified_base 20: mod_base = OTHER; note = 2'O-methyl-nucleotide phosphorothioate
  modified_base 21: mod_base = OTHER; note = 2'O-methyl-nucleotide
tgcctaatgagccacacttgg

SEQ ID NO: 483 - RNA, 23 nt, synthetic construct
  source 1..23: mol_type = other RNA
  modified_base 1: mod_base = OTHER; note = Inverted abasic nucleotide phosphorothioate
  modified_base 2: mod_base = OTHER; note = 2'O-methyl-nucleotide phosphorothioate
  modified_base 3: mod_base = OTHER; note = 2'O-methyl-nucleotide
  modified_base 4: mod_base = OTHER; note = 2'O-methyl-nucleotide
  modified_base 5: mod_base = OTHER; note = 2'O-methyl-nucleotide
  modified_base 6: mod_base = OTHER; note = 2'O-methyl-nucleotide
  modified_base 7: mod_base = OTHER; note = 2'O-methyl-nucleotide
  modified_base 8: mod_base = OTHER; note = 2'O-methyl-nucleotide
  modified_base 9: mod_base = OTHER; note = 2'O-methyl-nucleotide
  modified_base 10: mod_base = OTHER; note = 2'fluoro-nucleotide
  modified_base 11: mod_base = OTHER; note = 2'fluoro-nucleotide
  modified_base 12: mod_base = OTHER; note = 2'fluoro-nucleotide
  modified_base 13: mod_base = OTHER; note = 2'O-methyl-nucleotide
  modified_base 14: mod_base = OTHER; note = 2'O-methyl-nucleotide
  modified_base 15: mod_base = OTHER; note = 2'O-methyl-nucleotide
  modified_base 16: mod_base = OTHER; note = 2'O-methyl-nucleotide
  modified_base 17: mod_base = OTHER; note = 2'O-methyl-nucleotide
  modified_base 18: mod_base = OTHER; note = 2'O-methyl-nucleotide
  modified_base 19: mod_base = OTHER; note = 2'O-methyl-nucleotide
  modified_base 20: mod_base = OTHER; note = 2'O-methyl-nucleotide
  modified_base 21: mod_base = OTHER; note = 2'O-methyl-nucleotide phosphorothioate
  modified_base 22: mod_base = OTHER; note = 2'O-methyl-nucleotide phosphorothioate
  modified_base 23: mod_base = OTHER; note = Inverted abasic nucleotide
nccaagtgtggctcattaggcan

SEQ ID NO: 484 - RNA, 23 nt, synthetic construct
  source 1..23: mol_type = other RNA
  modified_base 1: mod_base = OTHER; note = Vinyl phosphonate 2'O-methyl-nucleotide phosphorothioate
  modified_base 2: mod_base = OTHER; note = 2'fluoro-nucleotide phosphorothioate
  modified_base 3: mod_base = OTHER; note = 2'O-methyl-nucleotide
  modified_base 4: mod_base = OTHER; note = 2'O-methyl-nucleotide
  modified_base 5: mod_base = OTHER; note = 2'O-methyl-nucleotide
  modified_base 6: mod_base = OTHER; note = 2'O-methyl-nucleotide
  modified_base 7: mod_base = OTHER; note = 2'fluoro-nucleotide
  modified_base 8: mod_base = OTHER; note = 2'O-methyl-nucleotide
  modified_base 9: mod_base = OTHER; note = 2'O-methyl-nucleotide
  modified_base 10: mod_base = OTHER; note = 2'O-methyl-nucleotide
  modified_base 11: mod_base = OTHER; note = 2'O-methyl-nucleotide
  modified_base 12: mod_base = OTHER; note = 2'fluoro-nucleotide
  modified_base 13: mod_base = OTHER; note = 2'O-methyl-nucleotide
  modified_base 14: mod_base = OTHER; note = 2'fluoro-nucleotide
  modified_base 15: mod_base = OTHER; note = 2'O-methyl-nucleotide
  modified_base 16: mod_base = OTHER; note = 2'O-methyl-nucleotide
  modified_base 17: mod_base = OTHER; note = 2'O-methyl-nucleotide
  modified_base 18: mod_base = OTHER; note = 2'O-methyl-nucleotide
  modified_base 19: mod_base = OTHER; note = 2'O-methyl-nucleotide
  modified_base 20: mod_base = OTHER; note = 2'O-methyl-nucleotide
  modified_base 21: mod_base = OTHER; note = 2'O-methyl-nucleotide phosphorothioate
  modified_base 22: mod_base = OTHER; note = 2'O-methyl-nucleotide phosphorothioate
  modified_base 23: mod_base = OTHER; note = 2'O-methyl-nucleotide
tgcctaatgagccacacttggtt

SEQ ID NO: 485 - RNA, 21 nt, synthetic construct
  source 1..21: mol_type = other RNA
  modified_base 1: mod_base = OTHER; note = 2'O-methyl-nucleotide phosphorothioate
  modified_base 2: mod_base = OTHER; note = 2'O-methyl-nucleotide phosphorothioate
  modified_base 3: mod_base = OTHER; note = 2'O-methyl-nucleotide
  modified_base 4: mod_base = OTHER; note = 2'O-methyl-nucleotide
  modified_base 5: mod_base = OTHER; note = 2'O-methyl-nucleotide
  modified_base 6: mod_base = OTHER; note = 2'O-methyl-nucleotide
  modified_base 7: mod_base = OTHER; note = 2'fluoro-nucleotide
  modified_base 8: mod_base = OTHER; note = 2'O-methyl-nucleotide
  modified_base 9: mod_base = OTHER; note = 2'fluoro-nucleotide
  modified_base 10: mod_base = OTHER; note = 2'fluoro-nucleotide
  modified_base 11: mod_base = OTHER; note = 2'fluoro-nucleotide
  modified_base 12: mod_base = OTHER; note = 2'O-methyl-nucleotide
  modified_base 13: mod_base = OTHER; note = 2'O-methyl-nucleotide
  modified_base 14: mod_base = OTHER; note = 2'O-methyl-nucleotide
  modified_base 15: mod_base = OTHER; note = 2'O-methyl-nucleotide
  modified_base 16: mod_base = OTHER; note = 2'O-methyl-nucleotide
  modified_base 17: mod_base = OTHER; note = 2'O-methyl-nucleotide
  modified_base 18: mod_base = OTHER; note = 2'O-methyl-nucleotide
  modified_base 19: mod_base = OTHER; note = 2'O-methyl-nucleotide phosphorothioate
  modified_base 20: mod_base = OTHER; note = 2'O-methyl-nucleotide phosphorothioate
  modified_base 21: mod_base = OTHER; note = 2'O-methyl-nucleotide
ccaagtgtggctcattaggca

SEQ ID NO: 486 - RNA, 23 nt, synthetic construct
  source 1..23: mol_type = other RNA
  modified_base 1: mod_base = OTHER; note = Vinyl phosphonate 2'O-methyl-nucleotide phosphorothioate
  modified_base 2: mod_base = OTHER; note = 2'fluoro-nucleotide phosphorothioate
  modified_base 3: mod_base = OTHER; note = 2'O-methyl-nucleotide
  modified_base 4: mod_base = OTHER; note = 2'O-methyl-nucleotide
  modified_base 5: mod_base = OTHER; note = 2'O-methyl-nucleotide
  modified_base 6: mod_base = OTHER; note = 2'fluoro-nucleotide
  modified_base 7: mod_base = OTHER; note = 2'O-methyl-nucleotide
  modified_base 8: mod_base = OTHER; note = 2'O-methyl-nucleotide
  modified_base 9: mod_base = OTHER; note = 2'fluoro-nucleotide
  modified_base 10: mod_base = OTHER; note = 2'O-methyl-nucleotide
  modified_base 11: mod_base = OTHER; note = 2'O-methyl-nucleotide
  modified_base 12: mod_base = OTHER; note = 2'O-methyl-nucleotide
  modified_base 13: mod_base = OTHER; note = 2'O-methyl-nucleotide
  modified_base 14: mod_base = OTHER; note = 2'fluoro-nucleotide
  modified_base 15: mod_base = OTHER; note = 2'O-methyl-nucleotide
  modified_base 16: mod_base = OTHER; note = 2'fluoro-nucleotide
  modified_base 17: mod_base = OTHER; note = 2'O-methyl-nucleotide
  modified_base 18: mod_base = OTHER; note = 2'O-methyl-nucleotide
  modified_base 19: mod_base = OTHER; note = 2'O-methyl-nucleotide
  modified_base 20: mod_base = OTHER; note = 2'O-methyl-nucleotide
  modified_base 21: mod_base = OTHER; note = 2'O-methyl-nucleotide phosphorothioate
  modified_base 22: mod_base = OTHER; note = 2'O-methyl-nucleotide phosphorothioate
  modified_base 23: mod_base = OTHER; note = 2'O-methyl-nucleotide
tgcctaatgagccacacttggag

SEQ ID NO: 487 - RNA, 21 nt, synthetic construct
  source 1..21: mol_type = other RNA
  modified_base 1: mod_base = OTHER; note = 2'O-methyl-nucleotide phosphorothioate
  modified_base 2: mod_base = OTHER; note = 2'O-methyl-nucleotide phosphorothioate
  modified_base 3: mod_base = OTHER; note = 2'O-methyl-nucleotide
  modified_base 4: mod_base = OTHER; note = 2'O-methyl-nucleotide
  modified_base 5: mod_base = OTHER; note = 2'O-methyl-nucleotide
  modified_base 6: mod_base = OTHER; note = 2'O-methyl-nucleotide
  modified_base 7: mod_base = OTHER; note = 2'fluoro-nucleotide
  modified_base 8: mod_base = OTHER; note = 2'O-methyl-nucleotide
  modified_base 9: mod_base = OTHER; note = 2'fluoro-nucleotide
  modified_base 10: mod_base = OTHER; note = 2'fluoro-nucleotide
  modified_base 11: mod_base = OTHER; note = 2'fluoro-nucleotide
  modified_base 12: mod_base = OTHER; note = 2'O-methyl-nucleotide
  modified_base 13: mod_base = OTHER; note = 2'O-methyl-nucleotide
  modified_base 14: mod_base = OTHER; note = 2'O-methyl-nucleotide
  modified_base 15: mod_base = OTHER; note = 2'O-methyl-nucleotide
  modified_base 16: mod_base = OTHER; note = 2'O-methyl-nucleotide
  modified_base 17: mod_base = OTHER; note = 2'O-methyl-nucleotide
  modified_base 18: mod_base = OTHER; note = 2'O-methyl-nucleotide
  modified_base 19: mod_base = OTHER; note = 2'O-methyl-nucleotide phosphorothioate
  modified_base 20: mod_base = OTHER; note = 2'O-methyl-nucleotide phosphorothioate
  modified_base 21: mod_base = OTHER; note = 2'O-methyl-nucleotide
ccaagtgtggctcattaggca

SEQ ID NO: 488 - RNA, 23 nt, synthetic construct
  source 1..23: mol_type = other RNA
  modified_base 1: mod_base = OTHER; note = Vinyl phosphonate 2'O-methyl-nucleotide phosphorothioate
  modified_base 2: mod_base = OTHER; note = 2'fluoro-nucleotide phosphorothioate
  modified_base 3: mod_base = OTHER; note = 2'O-methyl-nucleotide
  modified_base 4: mod_base = OTHER; note = 2'O-methyl-nucleotide
  modified_base 5: mod_base = OTHER; note = 2'O-methyl-nucleotide
  modified_base 6: mod_base = OTHER; note = 2'fluoro-nucleotide
  modified_base 7: mod_base = OTHER; note = 2'O-methyl-nucleotide
  modified_base 8: mod_base = OTHER; note = 2'fluoro-nucleotide
  modified_base 9: mod_base = OTHER; note = 2'O-methyl-nucleotide
  modified_base 10: mod_base = OTHER; note = 2'O-methyl-nucleotide
  modified_base 11: mod_base = OTHER; note = 2'O-methyl-nucleotide
  modified_base 12: mod_base = OTHER; note = 2'O-methyl-nucleotide
  modified_base 13: mod_base = OTHER; note = 2'O-methyl-nucleotide
  modified_base 14: mod_base = OTHER; note = 2'fluoro-nucleotide
  modified_base 15: mod_base = OTHER; note = 2'O-methyl-nucleotide
  modified_base 16: mod_base = OTHER; note = 2'fluoro-nucleotide
  modified_base 17: mod_base = OTHER; note = 2'O-methyl-nucleotide
  modified_base 18: mod_base = OTHER; note = 2'O-methyl-nucleotide
  modified_base 19: mod_base = OTHER; note = 2'O-methyl-nucleotide
  modified_base 20: mod_base = OTHER; note = 2'O-methyl-nucleotide
  modified_base 21: mod_base = OTHER; note = 2'O-methyl-nucleotide phosphorothioate
  modified_base 22: mod_base = OTHER; note = 2'O-methyl-nucleotide phosphorothioate
  modified_base 23: mod_base = OTHER; note = 2'O-methyl-nucleotide
tgcctaatgagccacacttggag

SEQ ID NO: 489 - RNA, 21 nt, synthetic construct
  source 1..21: mol_type = other RNA
  modified_base 1: mod_base = OTHER; note = 2'O-methyl-nucleotide phosphorothioate
  modified_base 2: mod_base = OTHER; note = 2'O-methyl-nucleotide phosphorothioate
  modified_base 3: mod_base = OTHER; note = 2'O-methyl-nucleotide
  modified_base 4: mod_base = OTHER; note = 2'O-methyl-nucleotide
  modified_base 5: mod_base = OTHER; note = 2'O-methyl-nucleotide
  modified_base 6: mod_base = OTHER; note = 2'O-methyl-nucleotide
  modified_base 7: mod_base = OTHER; note = 2'fluoro-nucleotide
  modified_base 8: mod_base = OTHER; note = 2'O-methyl-nucleotide
  modified_base 9: mod_base = OTHER; note = 2'fluoro-nucleotide
  modified_base 10: mod_base = OTHER; note = 2'fluoro-nucleotide
  modified_base 11: mod_base = OTHER; note = 2'fluoro-nucleotide
  modified_base 12: mod_base = OTHER; note = 2'O-methyl-nucleotide
  modified_base 13: mod_base = OTHER; note = 2'O-methyl-nucleotide
  modified_base 14: mod_base = OTHER; note = 2'O-methyl-nucleotide
  modified_base 15: mod_base = OTHER; note = 2'O-methyl-nucleotide
  modified_base 16: mod_base = OTHER; note = 2'O-methyl-nucleotide
  modified_base 17: mod_base = OTHER; note = 2'O-methyl-nucleotide
  modified_base 18: mod_base = OTHER; note = 2'O-methyl-nucleotide
  modified_base 19: mod_base = OTHER; note = 2'O-methyl-nucleotide phosphorothioate
  modified_base 20: mod_base = OTHER; note = 2'O-methyl-nucleotide phosphorothioate
  modified_base 21: mod_base = OTHER; note = 2'O-methyl-nucleotide
ccaagtgtggctcattaggca

SEQ ID NO: 490 - RNA, 23 nt, synthetic construct
  source 1..23: mol_type = other RNA
  modified_base 1: mod_base = OTHER; note = Vinyl phosphonate 2'O-methyl-nucleotide phosphorothioate
  modified_base 2: mod_base = OTHER; note = 2'fluoro-nucleotide phosphorothioate
  modified_base 3: mod_base = OTHER; note = 2'O-methyl-nucleotide
  modified_base 4: mod_base = OTHER; note = 2'O-methyl-nucleotide
  modified_base 5: mod_base = OTHER; note = 2'O-methyl-nucleotide
  modified_base 6: mod_base = OTHER; note = 2'fluoro-nucleotide
  modified_base 7: mod_base = OTHER; note = 2'O-methyl-nucleotide
  modified_base 8: mod_base = OTHER; note = 2'O-methyl-nucleotide
  modified_base 9: mod_base = OTHER; note = 2'O-methyl-nucleotide
  modified_base 10: mod_base = OTHER; note = 2'O-methyl-nucleotide
  modified_base 11: mod_base = OTHER; note = 2'O-methyl-nucleotide
  modified_base 12: mod_base = OTHER; note = 2'O-methyl-nucleotide
  modified_base 13: mod_base = OTHER; note = 2'O-methyl-nucleotide
  modified_base 14: mod_base = OTHER; note = 2'fluoro-nucleotide
  modified_base 15: mod_base = OTHER; note = 2'O-methyl-nucleotide
  modified_base 16: mod_base = OTHER; note = 2'fluoro-nucleotide
  modified_base 17: mod_base = OTHER; note = 2'O-methyl-nucleotide
  modified_base 18: mod_base = OTHER; note = 2'O-methyl-nucleotide
  modified_base 19: mod_base = OTHER; note = 2'O-methyl-nucleotide
  modified_base 20: mod_base = OTHER; note = 2'O-methyl-nucleotide
  modified_base 21: mod_base = OTHER; note = 2'O-methyl-nucleotide phosphorothioate
  modified_base 22: mod_base = OTHER; note = 2'O-methyl-nucleotide phosphorothioate
  modified_base 23: mod_base = OTHER; note = 2'O-methyl-nucleotide
tgcctaatgagccacacttggag

SEQ ID NO: 491-500 - skipped (10 entries)

SEQ ID NO: 501 - RNA, 19 nt, synthetic construct
  source 1..19: mol_type = other RNA
  modified_base 1: mod_base = OTHER; note = 2'O-methyl-nucleotide phosphorothioate
  modified_base 2: mod_base = OTHER; note = 2'O-methyl-nucleotide phosphorothioate
  modified_base 3: mod_base = OTHER; note = 2'O-methyl-nucleotide
  modified_base 4: mod_base = OTHER; note = 2'O-methyl-nucleotide
  modified_base 5: mod_base = OTHER; note = 2'fluoro-nucleotide
  modified_base 6: mod_base = OTHER; note = 2'O-methyl-nucleotide
  modified_base 7: mod_base = OTHER; note = 2'fluoro-nucleotide
  modified_base 8: mod_base = OTHER; note = 2'fluoro-nucleotide
  modified_base 9: mod_base = OTHER; note = 2'fluoro-nucleotide
  modified_base 10: mod_base = OTHER; note = 2'O-methyl-nucleotide
  modified_base 11: mod_base = OTHER; note = 2'O-methyl-nucleotide
  modified_base 12: mod_base = OTHER; note = 2'O-methyl-nucleotide
  modified_base 13: mod_base = OTHER; note = 2'O-methyl-nucleotide
  modified_base 14: mod_base = OTHER; note = 2'O-methyl-nucleotide
  modified_base 15: mod_base = OTHER; note = 2'O-methyl-nucleotide
  modified_base 16: mod_base = OTHER; note = 2'O-methyl-nucleotide
  modified_base 17: mod_base = OTHER; note = 2'O-methyl-nucleotide phosphorothioate
  modified_base 18: mod_base = OTHER; note = 2'O-methyl-nucleotide phosphorothioate
  modified_base 19: mod_base = OTHER; note = 2'O-methyl-nucleotide
aagtgtggctcattaggca

SEQ ID NO: 502 - RNA, 21 nt, synthetic construct
  source 1..21: mol_type = other RNA
  modified_base 1: mod_base = OTHER; note = Vinyl phosphonate 2'O-methyl-nucleotide phosphorothioate
  modified_base 2: mod_base = OTHER; note = 2'fluoro-nucleotide phosphorothioate
  modified_base 3: mod_base = OTHER; note = 2'O-methyl-nucleotide
  modified_base 4: mod_base = OTHER; note = 2'O-methyl-nucleotide
  modified_base 5: mod_base = OTHER; note = 2'O-methyl-nucleotide
  modified_base 6: mod_base = OTHER; note = 2'fluoro-nucleotide
  modified_base 7: mod_base = OTHER; note = 2'O-methyl-nucleotide
  modified_base 8: mod_base = OTHER; note = 2'O-methyl-nucleotide
  modified_base 9: mod_base = OTHER; note = 2'O-methyl-nucleotide
  modified_base 10: mod_base = OTHER; note = 2'O-methyl-nucleotide
  modified_base 11: mod_base = OTHER; note = 2'O-methyl-nucleotide
  modified_base 12: mod_base = OTHER; note = 2'O-methyl-nucleotide
  modified_base 13: mod_base = OTHER; note = 2'O-methyl-nucleotide
  modified_base 14: mod_base = OTHER; note = 2'fluoro-nucleotide
  modified_base 15: mod_base = OTHER; note = 2'O-methyl-nucleotide
  modified_base 16: mod_base = OTHER; note = 2'fluoro-nucleotide
  modified_base 17: mod_base = OTHER; note = 2'O-methyl-nucleotide
  modified_base 18: mod_base = OTHER; note = 2'O-methyl-nucleotide
  modified_base 19: mod_base = OTHER; note = 2'O-methyl-nucleotide phosphorothioate
  modified_base 20: mod_base = OTHER; note = 2'O-methyl-nucleotide phosphorothioate
  modified_base 21: mod_base = OTHER; note = 2'O-methyl-nucleotide
tgcctaatgagccacacttgg

SEQ ID NO: 503 - RNA, 21 nt, synthetic construct
  source 1..21: mol_type = other RNA
  modified_base 1: mod_base = OTHER; note = 2'O-methyl-nucleotide phosphorothioate
  modified_base 2: mod_base = OTHER; note = 2'O-methyl-nucleotide phosphorothioate
  modified_base 3: mod_base = OTHER; note = 2'O-methyl-nucleotide
  modified_base 4: mod_base = OTHER; note = 2'O-methyl-nucleotide
  modified_base 5: mod_base = OTHER; note = 2'O-methyl-nucleotide
  modified_base 6: mod_base = OTHER; note (2R,3R,4R,5R)-2-(6-amino-9H-purin-9-yl)-4-hydroxy-5-(hydrox ymethyl)tetrahydrofuran-3-yl hexadecylcarbamate nucleotide
  modified_base 7: mod_base = OTHER; note = 2'fluoro-nucleotide
  modified_base 8: mod_base = OTHER; note = 2'O-methyl-nucleotide
  modified_base 9: mod_base = OTHER; note = 2'fluoro-nucleotide
  modified_base 10: mod_base = OTHER; note = 2'fluoro-nucleotide
  modified_base 11: mod_base = OTHER; note = 2'fluoro-nucleotide
  modified_base 12: mod_base = OTHER; note = 2'O-methyl-nucleotide
  modified_base 13: mod_base = OTHER; note = 2'O-methyl-nucleotide
  modified_base 14: mod_base = OTHER; note = 2'O-methyl-nucleotide
  modified_base 15: mod_base = OTHER; note = 2'O-methyl-nucleotide
  modified_base 16: mod_base = OTHER; note = 2'O-methyl-nucleotide
  modified_base 17: mod_base = OTHER; note = 2'O-methyl-nucleotide
  modified_base 18: mod_base = OTHER; note = 2'O-methyl-nucleotide
  modified_base 19: mod_base = OTHER; note = 2'O-methyl-nucleotide phosphorothioate
  modified_base 20: mod_base = OTHER; note = 2'O-methyl-nucleotide phosphorothioate
  modified_base 21: mod_base = OTHER; note = 2'O-methyl-nucleotide
tgcaaatagtctacaaaccaa

SEQ ID NO: 504 - DNA, 23 bp, synthetic construct
  source 1..23: mol_type = other DNA
  modified_base 1: mod_base = OTHER; note = Vinyl phosphonate 2'O-methyl-nucleotide phosphorothioate
  modified_base 2: mod_base = OTHER; note = 2'fluoro-nucleotide phosphorothioate
  modified_base 3: mod_base = OTHER; note = 2'O-methyl-nucleotide
  modified_base 4: mod_base = OTHER; note = 2'O-methyl-nucleotide
  modified_base 6: mod_base = OTHER; note = 2'O-methyl-nucleotide
  modified_base 7: mod_base = OTHER; note = Glycol thymidine
  modified_base 8: mod_base = OTHER; note = 2'O-methyl-nucleotide
  modified_base 9: mod_base = OTHER; note = 2'O-methyl-nucleotide
  modified_base 10: mod_base = OTHER; note = 2'O-methyl-nucleotide
  modified_base 11: mod_base = OTHER; note = 2'O-methyl-nucleotide
  modified_base 12: mod_base = OTHER; note = 2'O-methyl-nucleotide
  modified_base 13: mod_base = OTHER; note = 2'O-methyl-nucleotide
  modified_base 14: mod_base = OTHER; note = 2'fluoro-nucleotide
  modified_base 15: mod_base = OTHER; note = 2'O-methyl-nucleotide
  modified_base 16: mod_base = OTHER; note = 2'fluoro-nucleotide
  modified_base 17: mod_base = OTHER; note = 2'O-methyl-nucleotide
  modified_base 18: mod_base = OTHER; note = 2'O-methyl-nucleotide
  modified_base 19: mod_base = OTHER; note = 2'O-methyl-nucleotide
  modified_base 20: mod_base = OTHER; note = 2'O-methyl-nucleotide
  modified_base 21: mod_base = OTHER; note = 2'O-methyl-nucleotide phosphorothioate
  modified_base 22: mod_base = OTHER; note = 2'O-methyl-nucleotide phosphorothioate
  modified_base 23: mod_base = OTHER; note = 2'O-methyl-nucleotide
  misc_feature 1..4: note = RNA
  misc_feature 5: note = DNA
  misc_feature 6..23: note = RNA
ttggtttgtagactatttgcaca

SEQ ID NO: 505 - RNA, 22 nt, synthetic construct
  source 1..22: mol_type = other RNA
  modified_base 1: mod_base = OTHER; note = Inverted abasic nucleotide phosphorothioate
  modified_base 2: mod_base = OTHER; note = 2'O-methyl-nucleotide phosphorothioate
  modified_base 3: mod_base = OTHER; note = 2'O-methyl-nucleotide
  modified_base 4: mod_base = OTHER; note = 2'O-methyl-nucleotide
  modified_base 5: mod_base = OTHER; note = 2'O-methyl-nucleotide
  modified_base 6: mod_base = OTHER; note = 2'O-methyl-nucleotide
  modified_base 7: mod_base = OTHER; note (2R,3R,4R,5R)-2-(6-amino-9H-purin-9-yl)-4-hydroxy-5-(hydrox ymethyl)tetrahydrofuran-3-yl hexadecylcarbamate nucleotide
  modified_base 8: mod_base = OTHER; note = 2'fluoro-nucleotide
  modified_base 9: mod_base = OTHER; note = 2'O-methyl-nucleotide
  modified_base 10: mod_base = OTHER; note = 2'fluoro-nucleotide
  modified_base 11: mod_base = OTHER; note = 2'fluoro-nucleotide
  modified_base 12: mod_base = OTHER; note = 2'fluoro-nucleotide
  modified_base 13: mod_base = OTHER; note = 2'O-methyl-nucleotide
  modified_base 14: mod_base = OTHER; note = 2'O-methyl-nucleotide
  modified_base 15: mod_base = OTHER; note = 2'O-methyl-nucleotide
  modified_base 16: mod_base = OTHER; note = 2'O-methyl-nucleotide
  modified_base 17: mod_base = OTHER; note = 2'O-methyl-nucleotide
  modified_base 18: mod_base = OTHER; note = 2'O-methyl-nucleotide
  modified_base 19: mod_base = OTHER; note = 2'O-methyl-nucleotide
  modified_base 20: mod_base = OTHER; note = 2'O-methyl-nucleotide phosphorothioate
  modified_base 21: mod_base = OTHER; note = 2'O-methyl-nucleotide phosphorothioate
  modified_base 22: mod_base = OTHER; note = 2'O-methyl-nucleotide
ntgcaaatagtctacaaaccaa

SEQ ID NO: 506 - DNA, 23 bp, synthetic construct
  source 1..23: mol_type = other DNA
  modified_base 1: mod_base = OTHER; note = Vinyl phosphonate 2'O-methyl-nucleotide phosphorothioate
  modified_base 2: mod_base = OTHER; note = 2'fluoro-nucleotide phosphorothioate
  modified_base 3: mod_base = OTHER; note = 2'O-methyl-nucleotide
  modified_base 4: mod_base = OTHER; note = 2'O-methyl-nucleotide
  modified_base 6: mod_base = OTHER; note = 2'O-methyl-nucleotide
  modified_base 7: mod_base = OTHER; note = Unlocked nucleotide
  modified_base 8: mod_base = OTHER; note = 2'O-methyl-nucleotide
  modified_base 9: mod_base = OTHER; note = 2'O-methyl-nucleotide
  modified_base 10: mod_base = OTHER; note = 2'O-methyl-nucleotide
  modified_base 11: mod_base = OTHER; note = 2'O-methyl-nucleotide
  modified_base 12: mod_base = OTHER; note = 2'O-methyl-nucleotide
  modified_base 13: mod_base = OTHER; note = 2'O-methyl-nucleotide
  modified_base 14: mod_base = OTHER; note = 2'fluoro-nucleotide
  modified_base 15: mod_base = OTHER; note = 2'O-methyl-nucleotide
  modified_base 16: mod_base = OTHER; note = 2'fluoro-nucleotide
  modified_base 17: mod_base = OTHER; note = 2'O-methyl-nucleotide
  modified_base 18: mod_base = OTHER; note = 2'O-methyl-nucleotide
  modified_base 19: mod_base = OTHER; note = 2'O-methyl-nucleotide
  modified_base 20: mod_base = OTHER; note = 2'O-methyl-nucleotide
  modified_base 21: mod_base = OTHER; note = 2'O-methyl-nucleotide phosphorothioate
  modified_base 22: mod_base = OTHER; note = 2'O-methyl-nucleotide phosphorothioate
  modified_base 23: mod_base = OTHER; note = 2'O-methyl-nucleotide
  misc_feature 1..4: note = RNA
  misc_feature 5: note = DNA
  misc_feature 6..23: note = RNA
ttggtttgtagactatttgcaca

SEQ ID NO: 507 - RNA, 22 nt, synthetic construct
  source 1..22: mol_type = other RNA
  modified_base 1: mod_base = OTHER; note = Inverted abasic nucleotide phosphorothioate
  modified_base 2: mod_base = OTHER; note = 2'O-methyl-nucleotide phosphorothioate
  modified_base 3: mod_base = OTHER; note = 2'O-methyl-nucleotide
  modified_base 4: mod_base = OTHER; note = 2'O-methyl-nucleotide
  modified_base 5: mod_base = OTHER; note = 2'O-methyl-nucleotide
  modified_base 6: mod_base = OTHER; note = 2'O-methyl-nucleotide
  modified_base 7: mod_base = OTHER; note (2R,3R,4R,5R)-2-(6-amino-9H-purin-9-yl)-4-hydroxy-5-(hydrox ymethyl)tetrahydrofuran-3-yl hexadecylcarbamate nucleotide
  modified_base 8: mod_base = OTHER; note = 2'fluoro-nucleotide
  modified_base 9: mod_base = OTHER; note = 2'O-methyl-nucleotide
  modified_base 10: mod_base = OTHER; note = 2'fluoro-nucleotide
  modified_base 11: mod_base = OTHER; note = 2'fluoro-nucleotide
  modified_base 12: mod_base = OTHER; note = 2'fluoro-nucleotide
  modified_base 13: mod_base = OTHER; note = 2'O-methyl-nucleotide
  modified_base 14: mod_base = OTHER; note = 2'O-methyl-nucleotide
  modified_base 15: mod_base = OTHER; note = 2'O-methyl-nucleotide
  modified_base 16: mod_base = OTHER; note = 2'O-methyl-nucleotide
  modified_base 17: mod_base = OTHER; note = 2'O-methyl-nucleotide
  modified_base 18: mod_base = OTHER; note = 2'O-methyl-nucleotide
  modified_base 19: mod_base = OTHER; note = 2'O-methyl-nucleotide
  modified_base 20: mod_base = OTHER; note = 2'O-methyl-nucleotide phosphorothioate
  modified_base 21: mod_base = OTHER; note = 2'O-methyl-nucleotide phosphorothioate
  modified_base 22: mod_base = OTHER; note = 2'O-methyl-nucleotide
ntgcaaatagtctacaaaccaa

SEQ ID NO: 508 - DNA, 23 bp, synthetic construct
  source 1..23: mol_type = other DNA
  modified_base 1: mod_base = OTHER; note = Vinyl phosphonate 2'O-methyl-nucleotide phosphorothioate
  modified_base 2: mod_base = OTHER; note = 2'fluoro-nucleotide phosphorothioate
  modified_base 3: mod_base = OTHER; note = 2'O-methyl-nucleotide
  modified_base 4: mod_base = OTHER; note = 2'O-methyl-nucleotide
  modified_base 6: mod_base = OTHER; note = 2'O-methyl-nucleotide
  modified_base 7: mod_base = OTHER; note = Glycol thymidine
  modified_base 8: mod_base = OTHER; note = 2'O-methyl-nucleotide
  modified_base 9: mod_base = OTHER; note = 2'O-methyl-nucleotide
  modified_base 10: mod_base = OTHER; note = 2'O-methyl-nucleotide
  modified_base 11: mod_base = OTHER; note = 2'O-methyl-nucleotide
  modified_base 12: mod_base = OTHER; note = 2'O-methyl-nucleotide
  modified_base 13: mod_base = OTHER; note = 2'O-methyl-nucleotide
  modified_base 14: mod_base = OTHER; note = 2'fluoro-nucleotide
  modified_base 15: mod_base = OTHER; note = 2'O-methyl-nucleotide
  modified_base 16: mod_base = OTHER; note = 2'fluoro-nucleotide
  modified_base 17: mod_base = OTHER; note = 2'O-methyl-nucleotide
  modified_base 18: mod_base = OTHER; note = 2'O-methyl-nucleotide
  modified_base 19: mod_base = OTHER; note = 2'O-methyl-nucleotide
  modified_base 20: mod_base = OTHER; note = 2'O-methyl-nucleotide
  modified_base 21: mod_base = OTHER; note = 2'O-methyl-nucleotide phosphorothioate
  modified_base 22: mod_base = OTHER; note = 2'O-methyl-nucleotide phosphorothioate
  modified_base 23: mod_base = OTHER; note = 2'O-methyl-nucleotide
  misc_feature 1..4: note = RNA
  misc_feature 5: note = DNA
  misc_feature 6..23: note = RNA
ttggtttgtagactatttgcaca

SEQ ID NO: 509 - RNA, 22 nt, synthetic construct
  source 1..22: mol_type = other RNA
  modified_base 1: mod_base = OTHER; note = Inverted abasic nucleotide phosphorothioate
  modified_base 2: mod_base = OTHER; note = 2'O-methyl-nucleotide phosphorothioate
  modified_base 3: mod_base = OTHER; note = 2'O-methyl-nucleotide
  modified_base 4: mod_base = OTHER; note = 2'O-methyl-nucleotide
  modified_base 5: mod_base = OTHER; note = 2'O-methyl-nucleotide
  modified_base 6: mod_base = OTHER; note = 2'O-methyl-nucleotide
  modified_base 7: mod_base = OTHER; note (2R,3R,4R,5R)-2-(6-amino-9H-purin-9-yl)-4-hydroxy-5-(hydrox ymethyl)tetrahydrofuran-3-yl hexadecylcarbamate nucleotide
  modified_base 8: mod_base = OTHER; note = 2'fluoro-nucleotide
  modified_base 9: mod_base = OTHER; note = 2'O-methyl-nucleotide
  modified_base 10: mod_base = OTHER; note = 2'fluoro-nucleotide
  modified_base 11: mod_base = OTHER; note = 2'fluoro-nucleotide
  modified_base 12: mod_base = OTHER; note = 2'fluoro-nucleotide
  modified_base 13: mod_base = OTHER; note = 2'O-methyl-nucleotide
  modified_base 14: mod_base = OTHER; note = 2'O-methyl-nucleotide
  modified_base 15: mod_base = OTHER; note = 2'O-methyl-nucleotide
  modified_base 16: mod_base = OTHER; note = 2'O-methyl-nucleotide
  modified_base 17: mod_base = OTHER; note = 2'O-methyl-nucleotide
  modified_base 18: mod_base = OTHER; note = 2'O-methyl-nucleotide
  modified_base 19: mod_base = OTHER; note = 2'O-methyl-nucleotide
  modified_base 20: mod_base = OTHER; note = 2'O-methyl-nucleotide phosphorothioate
  modified_base 21: mod_base = OTHER; note = 2'O-methyl-nucleotide phosphorothioate
  modified_base 22: mod_base = OTHER; note = 2'O-methyl-nucleotide
ntgcaaatagtctacaaaccaa

SEQ ID NO: 510 - DNA, 23 bp, synthetic construct
  source 1..23: mol_type = other DNA
  modified_base 1: mod_base = OTHER; note = Vinyl phosphonate 2'O-methyl-nucleotide phosphorothioate
  modified_base 2: mod_base = OTHER; note = 2'fluoro-nucleotide phosphorothioate
  modified_base 3: mod_base = OTHER; note = 2'O-methyl-nucleotide
  modified_base 4: mod_base = OTHER; note = 2'O-methyl-nucleotide
  modified_base 6: mod_base = OTHER; note = 2'O-methyl-nucleotide
  modified_base 8: mod_base = OTHER; note = 2'O-methyl-nucleotide
  modified_base 9: mod_base = OTHER; note = 2'O-methyl-nucleotide
  modified_base 10: mod_base = OTHER; note = 2'O-methyl-nucleotide
  modified_base 11: mod_base = OTHER; note = 2'O-methyl-nucleotide
  modified_base 12: mod_base = OTHER; note = 2'O-methyl-nucleotide
  modified_base 13: mod_base = OTHER; note = 2'O-methyl-nucleotide
  modified_base 14: mod_base = OTHER; note = 2'fluoro-nucleotide
  modified_base 15: mod_base = OTHER; note = 2'O-methyl-nucleotide
  modified_base 16: mod_base = OTHER; note = 2'fluoro-nucleotide
  modified_base 17: mod_base = OTHER; note = 2'O-methyl-nucleotide
  modified_base 18: mod_base = OTHER; note = 2'O-methyl-nucleotide
  modified_base 19: mod_base = OTHER; note = 2'O-methyl-nucleotide
  modified_base 20: mod_base = OTHER; note = 2'O-methyl-nucleotide
  modified_base 21: mod_base = OTHER; note = 2'O-methyl-nucleotide phosphorothioate
  modified_base 22: mod_base = OTHER; note = 2'O-methyl-nucleotide phosphorothioate
  modified_base 23: mod_base = OTHER; note = 2'O-methyl-nucleotide
  misc_feature 1..4: note = RNA
  misc_feature 5: note = DNA
  misc_feature 6: note = RNA
  misc_feature 7: note = DNA
  misc_feature 8..23: note = RNA
ttggtttgtagactatttgcaca

SEQ ID NO: 511 - RNA, 22 nt, synthetic construct
  source 1..22: mol_type = other RNA
  modified_base 1: mod_base = OTHER; note = Inverted abasic nucleotide phosphorothioate
  modified_base 2: mod_base = OTHER; note = 2'O-methyl-nucleotide phosphorothioate
  modified_base 3: mod_base = OTHER; note = 2'O-methyl-nucleotide
  modified_base 4: mod_base = OTHER; note = 2'O-methyl-nucleotide
  modified_base 5: mod_base = OTHER; note = 2'O-methyl-nucleotide
  modified_base 6: mod_base = OTHER; note = 2'O-methyl-nucleotide
  modified_base 7: mod_base = OTHER; note (2R,3R,4R,5R)-2-(6-amino-9H-purin-9-yl)-4-hydroxy-5-(hydrox ymethyl)tetrahydrofuran-3-yl hexadecylcarbamate nucleotide
  modified_base 8: mod_base = OTHER; note = 2'fluoro-nucleotide
  modified_base 9: mod_base = OTHER; note = 2'O-methyl-nucleotide
  modified_base 10: mod_base = OTHER; note = 2'fluoro-nucleotide
  modified_base 11: mod_base = OTHER; note = 2'fluoro-nucleotide
  modified_base 12: mod_base = OTHER; note = 2'fluoro-nucleotide
  modified_base 13: mod_base = OTHER; note = 2'O-methyl-nucleotide
  modified_base 14: mod_base = OTHER; note = 2'O-methyl-nucleotide
  modified_base 15: mod_base = OTHER; note = 2'O-methyl-nucleotide
  modified_base 16: mod_base = OTHER; note = 2'O-methyl-nucleotide
  modified_base 17: mod_base = OTHER; note = 2'O-methyl-nucleotide
  modified_base 18: mod_base = OTHER; note = 2'O-methyl-nucleotide
  modified_base 19: mod_base = OTHER; note = 2'O-methyl-nucleotide
  modified_base 20: mod_base = OTHER; note = 2'O-methyl-nucleotide phosphorothioate
  modified_base 21: mod_base = OTHER; note = 2'O-methyl-nucleotide phosphorothioate
  modified_base 22: mod_base = OTHER; note = 2'O-methyl-nucleotide
ntgcaaatagtctacaaaccaa

SEQ ID NO: 512 - DNA, 23 bp, synthetic construct
  source 1..23: mol_type = other DNA
  modified_base 1: mod_base = OTHER; note = Vinyl phosphonate 2'O-methyl-nucleotide phosphorothioate
  modified_base 2: mod_base = OTHER; note = 2'fluoro-nucleotide phosphorothioate
  modified_base 3: mod_base = OTHER; note = 2'O-methyl-nucleotide
  modified_base 4: mod_base = OTHER; note = 2'O-methyl-nucleotide
  modified_base 6: mod_base = OTHER; note = 2'O-methyl-nucleotide
  modified_base 7: mod_base = OTHER; note = (L)-alpha-threofuranosyl (3'-2') modified nucleotide
  modified_base 8: mod_base = OTHER; note = 2'O-methyl-nucleotide
  modified_base 9: mod_base = OTHER; note = 2'O-methyl-nucleotide
  modified_base 10: mod_base = OTHER; note = 2'O-methyl-nucleotide
  modified_base 11: mod_base = OTHER; note = 2'O-methyl-nucleotide
  modified_base 12: mod_base = OTHER; note = 2'O-methyl-nucleotide
  modified_base 13: mod_base = OTHER; note = 2'O-methyl-nucleotide
  modified_base 14: mod_base = OTHER; note = 2'fluoro-nucleotide
  modified_base 15: mod_base = OTHER; note = 2'O-methyl-nucleotide
  modified_base 16: mod_base = OTHER; note = 2'fluoro-nucleotide
  modified_base 17: mod_base = OTHER; note = 2'O-methyl-nucleotide
  modified_base 18: mod_base = OTHER; note = 2'O-methyl-nucleotide
  modified_base 19: mod_base = OTHER; note = 2'O-methyl-nucleotide
  modified_base 20: mod_base = OTHER; note = 2'O-methyl-nucleotide
  modified_base 21: mod_base = OTHER; note = 2'O-methyl-nucleotide phosphorothioate
  modified_base 22: mod_base = OTHER; note = 2'O-methyl-nucleotide phosphorothioate
  modified_base 23: mod_base = OTHER; note = 2'O-methyl-nucleotide
  misc_feature 1..4: note = RNA
  misc_feature 5: note = DNA
  misc_feature 6..23: note = RNA
ttggtttgtagactatttgcaca

SEQ ID NO: 513 - RNA, 22 nt, synthetic construct
  source 1..22: mol_type = other RNA
  modified_base 1: mod_base = OTHER; note = Inverted abasic nucleotide phosphorothioate
  modified_base 2: mod_base = OTHER; note = 2'O-methyl-nucleotide phosphorothioate
  modified_base 3: mod_base = OTHER; note = 2'O-methyl-nucleotide
  modified_base 4: mod_base = OTHER; note = 2'O-methyl-nucleotide
  modified_base 5: mod_base = OTHER; note = 2'O-methyl-nucleotide
  modified_base 6: mod_base = OTHER; note = 2'O-methyl-nucleotide
  modified_base 7: mod_base = OTHER; note (2R,3R,4R,5R)-2-(6-amino-9H-purin-9-yl)-4-hydroxy-5-(hydrox ymethyl)tetrahydrofuran-3-yl hexadecylcarbamate nucleotide
  modified_base 8: mod_base = OTHER; note = 2'fluoro-nucleotide
  modified_base 9: mod_base = OTHER; note = 2'O-methyl-nucleotide
  modified_base 10: mod_base = OTHER; note = 2'fluoro-nucleotide
  modified_base 11: mod_base = OTHER; note = 2'fluoro-nucleotide
  modified_base 12: mod_base = OTHER; note = 2'fluoro-nucleotide
  modified_base 13: mod_base = OTHER; note = 2'O-methyl-nucleotide
  modified_base 14: mod_base = OTHER; note = 2'O-methyl-nucleotide
  modified_base 15: mod_base = OTHER; note = 2'O-methyl-nucleotide
  modified_base 16: mod_base = OTHER; note = 2'O-methyl-nucleotide
  modified_base 17: mod_base = OTHER; note = 2'O-methyl-nucleotide
  modified_base 18: mod_base = OTHER; note = 2'O-methyl-nucleotide
  modified_base 19: mod_base = OTHER; note = 2'O-methyl-nucleotide
  modified_base 20: mod_base = OTHER; note = 2'O-methyl-nucleotide phosphorothioate
  modified_base 21: mod_base = OTHER; note = 2'O-methyl-nucleotide phosphorothioate
  modified_base 22: mod_base = OTHER; note = 2'O-methyl-nucleotide
ntgcaaatagtctacaaaccaa

SEQ ID NO: 514 - DNA, 23 bp, synthetic construct
  source 1..23: mol_type = other DNA
  modified_base 1: mod_base = OTHER; note = Vinyl phosphonate 2'O-methyl-nucleotide phosphorothioate
  modified_base 2: mod_base = OTHER; note = 2'fluoro-nucleotide phosphorothioate
  modified_base 3: mod_base = OTHER; note = 2'O-methyl-nucleotide
  modified_base 4: mod_base = OTHER; note = 2'O-methyl-nucleotide
  modified_base 6: mod_base = OTHER; note = 2'O-methyl-nucleotide
  modified_base 7: mod_base = OTHER; note = 3'-O-methyl modified nucleotide with 2'-5' linked phosphate
  modified_base 8: mod_base = OTHER; note = 2'O-methyl-nucleotide
  modified_base 9: mod_base = OTHER; note = 2'O-methyl-nucleotide
  modified_base 10: mod_base = OTHER; note = 2'O-methyl-nucleotide
  modified_base 11: mod_base = OTHER; note = 2'O-methyl-nucleotide
  modified_base 12: mod_base = OTHER; note = 2'O-methyl-nucleotide
  modified_base 13: mod_base = OTHER; note = 2'O-methyl-nucleotide
  modified_base 14: mod_base = OTHER; note = 2'fluoro-nucleotide
  modified_base 15: mod_base = OTHER; note = 2'O-methyl-nucleotide
  modified_base 16: mod_base = OTHER; note = 2'fluoro-nucleotide
  modified_base 17: mod_base = OTHER; note = 2'O-methyl-nucleotide
  modified_base 18: mod_base = OTHER; note = 2'O-methyl-nucleotide
  modified_base 19: mod_base = OTHER; note = 2'O-methyl-nucleotide
  modified_base 20: mod_base = OTHER; note = 2'O-methyl-nucleotide
  modified_base 21: mod_base = OTHER; note = 2'O-methyl-nucleotide phosphorothioate
  modified_base 22: mod_base = OTHER; note = 2'O-methyl-nucleotide phosphorothioate
  modified_base 23: mod_base = OTHER; note = 2'O-methyl-nucleotide
  misc_feature 1..4: note = RNA
  misc_feature 5: note = DNA
  misc_feature 6..23: note = RNA
ttggtttgtagactatttgcaca

SEQ ID NO: 515 - RNA, 22 nt, synthetic construct
  source 1..22: mol_type = other RNA
  modified_base 1: mod_base = OTHER; note = Inverted abasic nucleotide phosphorothioate
  modified_base 2: mod_base = OTHER; note = 2'O-methyl-nucleotide phosphorothioate
  modified_base 3: mod_base = OTHER; note = 2'O-methyl-nucleotide
  modified_base 4: mod_base = OTHER; note = 2'O-methyl-nucleotide
  modified_base 5: mod_base = OTHER; note = 2'O-methyl-nucleotide
  modified_base 6: mod_base = OTHER; note = 2'O-methyl-nucleotide
  modified_base 7: mod_base = OTHER; note (2R,3R,4R,5R)-2-(6-amino-9H-purin-9-yl)-4-hydroxy-5-(hydrox ymethyl)tetrahydrofuran-3-yl hexadecylcarbamate nucleotide
  modified_base 8: mod_base = OTHER; note = 2'fluoro-nucleotide
  modified_base 9: mod_base = OTHER; note = 2'O-methyl-nucleotide
  modified_base 10: mod_base = OTHER; note = 2'fluoro-nucleotide
  modified_base 11: mod_base = OTHER; note = 2'fluoro-nucleotide
  modified_base 12: mod_base = OTHER; note = 2'fluoro-nucleotide
  modified_base 13: mod_base = OTHER; note = 2'O-methyl-nucleotide
  modified_base 14: mod_base = OTHER; note = 2'O-methyl-nucleotide
  modified_base 15: mod_base = OTHER; note = 2'O-methyl-nucleotide
  modified_base 16: mod_base = OTHER; note = 2'O-methyl-nucleotide
  modified_base 17: mod_base = OTHER; note = 2'O-methyl-nucleotide
  modified_base 18: mod_base = OTHER; note = 2'O-methyl-nucleotide
  modified_base 19: mod_base = OTHER; note = 2'O-methyl-nucleotide
  modified_base 20: mod_base = OTHER; note = 2'O-methyl-nucleotide phosphorothioate
  modified_base 21: mod_base = OTHER; note = 2'O-methyl-nucleotide phosphorothioate
  modified_base 22: mod_base = OTHER; note = 2'O-methyl-nucleotide
ntgcaaatagtctacaaaccaa

SEQ ID NO: 516 - RNA, 23 nt, synthetic construct
  source 1..23: mol_type = other RNA
  modified_base 1: mod_base = OTHER; note = 5'-cis-cyclobutyl phosphonate-2'-O-methyl-nucleotide phosphorothioate
  modified_base 2: mod_base = OTHER; note = 2'fluoro-nucleotide phosphorothioate
  modified_base 3: mod_base = OTHER; note = 2'O-methyl-nucleotide
  modified_base 4: mod_base = OTHER; note = 2'O-methyl-nucleotide
  modified_base 5: mod_base = OTHER; note = 2'O-methyl-nucleotide
  modified_base 6: mod_base = OTHER; note = 2'fluoro-nucleotide
  modified_base 7: mod_base = OTHER; note = 2'O-methyl-nucleotide
  modified_base 8: mod_base = OTHER; note = 2'fluoro-nucleotide
  modified_base 9: mod_base = OTHER; note = 2'fluoro-nucleotide
  modified_base 10: mod_base = OTHER; note = 2'O-methyl-nucleotide
  modified_base 11: mod_base = OTHER; note = 2'O-methyl-nucleotide
  modified_base 12: mod_base = OTHER; note = 2'O-methyl-nucleotide
  modified_base 13: mod_base = OTHER; note = 2'O-methyl-nucleotide
  modified_base 14: mod_base = OTHER; note = 2'fluoro-nucleotide
  modified_base 15: mod_base = OTHER; note = 2'O-methyl-nucleotide
  modified_base 16: mod_base = OTHER; note = 2'fluoro-nucleotide
  modified_base 17: mod_base = OTHER; note = 2'O-methyl-nucleotide
  modified_base 18: mod_base = OTHER; note = 2'O-methyl-nucleotide
  modified_base 19: mod_base = OTHER; note = 2'O-methyl-nucleotide
  modified_base 20: mod_base = OTHER; note = 2'O-methyl-nucleotide
  modified_base 21: mod_base = OTHER; note = 2'O-methyl-nucleotide phosphorothioate
  modified_base 22: mod_base = OTHER; note = 2'O-methyl-nucleotide phosphorothioate
  modified_base 23: mod_base = OTHER; note = 2'O-methyl-nucleotide
ttggtttgtagactatttgcaca

SEQ ID NO: 517 - RNA, 23 nt, synthetic construct
  source 1..23: mol_type = other RNA
  modified_base 1: mod_base = OTHER; note = Inverted abasic nucleotide phosphorothioate
  modified_base 2: mod_base = OTHER; note = 2'O-methyl-nucleotide phosphorothioate
  modified_base 3: mod_base = OTHER; note = 2'O-methyl-nucleotide
  modified_base 4: mod_base = OTHER; note = 2'O-methyl-nucleotide
  modified_base 5: mod_base = OTHER; note = 2'O-methyl-nucleotide
  modified_base 6: mod_base = OTHER; note = 2'O-methyl-nucleotide
  modified_base 7: mod_base = OTHER; note = 2'O-methyl-nucleotide
  modified_base 8: mod_base = OTHER; note (2R,3R,4R,5R)-2-(2,4-dioxo-3,4-dihydropyrimidin-1(2H)-yl)-4 -hydroxy-5-(hydroxymethyl)tetrahydrofuran-3-yl hexadecylcarbamate nucleotide
  modified_base 9: mod_base = OTHER; note = 2'O-methyl-nucleotide
  modified_base 10: mod_base = OTHER; note = 2'fluoro-nucleotide
  modified_base 11: mod_base = OTHER; note = 2'fluoro-nucleotide
  modified_base 12: mod_base = OTHER; note = 2'fluoro-nucleotide
  modified_base 13: mod_base = OTHER; note = 2'O-methyl-nucleotide
  modified_base 14: mod_base = OTHER; note = 2'O-methyl-nucleotide
  modified_base 15: mod_base = OTHER; note = 2'O-methyl-nucleotide
  modified_base 16: mod_base = OTHER; note = 2'O-methyl-nucleotide
  modified_base 17: mod_base = OTHER; note = 2'O-methyl-nucleotide
  modified_base 18: mod_base = OTHER; note = 2'O-methyl-nucleotide
  modified_base 19: mod_base = OTHER; note = 2'O-methyl-nucleotide
  modified_base 20: mod_base = OTHER; note = 2'O-methyl-nucleotide
  modified_base 21: mod_base = OTHER; note = 2'O-methyl-nucleotide phosphorothioate
  modified_base 22: mod_base = OTHER; note = 2'O-methyl-nucleotide phosphorothioate
  modified_base 23: mod_base = OTHER; note = Inverted abasic nucleotide
ntgcaaatagtctacaaaccaan

SEQ ID NO: 518 - DNA, 21 bp, synthetic construct
  source 1..21: mol_type = other DNA
  modified_base 1: mod_base = OTHER; note = Vinyl phosphonate 2'O-methyl-nucleotide phosphorothioate
  modified_base 2: mod_base = OTHER; note = 2'fluoro-nucleotide phosphorothioate
  modified_base 3: mod_base = OTHER; note = 2'O-methyl-nucleotide
  modified_base 4: mod_base = OTHER; note = 2'O-methyl-nucleotide
  modified_base 6: mod_base = OTHER; note = 2'O-methyl-nucleotide
  modified_base 7: mod_base = OTHER; note = Unlocked nucleotide
  modified_base 8: mod_base = OTHER; note = 2'O-methyl-nucleotide
  modified_base 9: mod_base = OTHER; note = 2'O-methyl-nucleotide
  modified_base 10: mod_base = OTHER; note = 2'O-methyl-nucleotide
  modified_base 11: mod_base = OTHER; note = 2'O-methyl-nucleotide
  modified_base 12: mod_base = OTHER; note = 2'O-methyl-nucleotide
  modified_base 13: mod_base = OTHER; note = 2'O-methyl-nucleotide
  modified_base 14: mod_base = OTHER; note = 2'fluoro-nucleotide
  modified_base 15: mod_base = OTHER; note = 2'O-methyl-nucleotide
  modified_base 16: mod_base = OTHER; note = 2'fluoro-nucleotide
  modified_base 17: mod_base = OTHER; note = 2'O-methyl-nucleotide
  modified_base 18: mod_base = OTHER; note = 2'O-methyl-nucleotide
  modified_base 19: mod_base = OTHER; note = 2'O-methyl-nucleotide phosphorothioate
  modified_base 20: mod_base = OTHER; note = 2'O-methyl-nucleotide phosphorothioate
  modified_base 21: mod_base = OTHER; note = 2'O-methyl-nucleotide
  misc_feature 1..4: note = RNA
  misc_feature 5: note = DNA
  misc_feature 6..21: note = RNA
ttggtttgtagactatttgca

SEQ ID NO: 519 - RNA, 23 nt, synthetic construct
  source 1..23: mol_type = other RNA
  modified_base 1: mod_base = OTHER; note = Inverted abasic nucleotide phosphorothioate
  modified_base 2: mod_base = OTHER; note = 2'O-methyl-nucleotide phosphorothioate
  modified_base 3: mod_base = OTHER; note = 2'O-methyl-nucleotide
  modified_base 4: mod_base = OTHER; note = 2'O-methyl-nucleotide
  modified_base 5: mod_base = OTHER; note = 2'O-methyl-nucleotide
  modified_base 6: mod_base = OTHER; note = 2'O-methyl-nucleotide
  modified_base 7: mod_base = OTHER; note = 2'O-methyl-nucleotide
  modified_base 8: mod_base = OTHER; note (2R,3R,4R,5R)-2-(2,4-dioxo-3,4-dihydropyrimidin-1(2H)-yl)-4 -hydroxy-5-(hydroxymethyl)tetrahydrofuran-3-yl hexadecylcarbamate nucleotide
  modified_base 9: mod_base = OTHER; note = 2'O-methyl-nucleotide
  modified_base 10: mod_base = OTHER; note = 2'fluoro-nucleotide
  modified_base 11: mod_base = OTHER; note = 2'fluoro-nucleotide
  modified_base 12: mod_base = OTHER; note = 2'fluoro-nucleotide
  modified_base 13: mod_base = OTHER; note = 2'O-methyl-nucleotide
  modified_base 14: mod_base = OTHER; note = 2'O-methyl-nucleotide
  modified_base 15: mod_base = OTHER; note = 2'O-methyl-nucleotide
  modified_base 16: mod_base = OTHER; note = 2'O-methyl-nucleotide
  modified_base 17: mod_base = OTHER; note = 2'O-methyl-nucleotide
  modified_base 18: mod_base = OTHER; note = 2'O-methyl-nucleotide
  modified_base 19: mod_base = OTHER; note = 2'O-methyl-nucleotide
  modified_base 20: mod_base = OTHER; note = 2'O-methyl-nucleotide
  modified_base 21: mod_base = OTHER; note = 2'O-methyl-nucleotide phosphorothioate
  modified_base 22: mod_base = OTHER; note = 2'O-methyl-nucleotide phosphorothioate
  modified_base 23: mod_base = OTHER; note = Inverted abasic nucleotide
ntgcaaatagtctacaaaccaan

SEQ ID NO: 520 - DNA, 21 bp, synthetic construct
  source 1..21: mol_type = other DNA
  modified_base 1: mod_base = OTHER; note = Vinyl phosphonate 2'O-methyl-nucleotide phosphorothioate
  modified_base 2: mod_base = OTHER; note = 2'fluoro-nucleotide phosphorothioate
  modified_base 3: mod_base = OTHER; note = 2'O-methyl-nucleotide
  modified_base 4: mod_base = OTHER; note = 2'O-methyl-nucleotide
  modified_base 6: mod_base = OTHER; note = 2'O-methyl-nucleotide
  modified_base 7: mod_base = OTHER; note = Glycol thymidine
  modified_base 8: mod_base = OTHER; note = 2'O-methyl-nucleotide
  modified_base 9: mod_base = OTHER; note = 2'O-methyl-nucleotide
  modified_base 10: mod_base = OTHER; note = 2'O-methyl-nucleotide
  modified_base 11: mod_base = OTHER; note = 2'O-methyl-nucleotide
  modified_base 12: mod_base = OTHER; note = 2'O-methyl-nucleotide
  modified_base 13: mod_base = OTHER; note = 2'O-methyl-nucleotide
  modified_base 14: mod_base = OTHER; note = 2'fluoro-nucleotide
  modified_base 15: mod_base = OTHER; note = 2'O-methyl-nucleotide
  modified_base 16: mod_base = OTHER; note = 2'fluoro-nucleotide
  modified_base 17: mod_base = OTHER; note = 2'O-methyl-nucleotide
  modified_base 18: mod_base = OTHER; note = 2'O-methyl-nucleotide
  modified_base 19: mod_base = OTHER; note = 2'O-methyl-nucleotide phosphorothioate
  modified_base 20: mod_base = OTHER; note = 2'O-methyl-nucleotide phosphorothioate
  modified_base 21: mod_base = OTHER; note = 2'O-methyl-nucleotide
  misc_feature 1..4: note = RNA
  misc_feature 5: note = DNA
  misc_feature 6..21: note = RNA
ttggtttgtagactatttgca

SEQ ID NO: 521 - RNA, 23 nt, synthetic construct
  source 1..23: mol_type = other RNA
  modified_base 1: mod_base = OTHER; note = Inverted abasic nucleotide phosphorothioate
  modified_base 2: mod_base = OTHER; note = 2'O-methyl-nucleotide phosphorothioate
  modified_base 3: mod_base = OTHER; note = 2'O-methyl-nucleotide
  modified_base 4: mod_base = OTHER; note = 2'O-methyl-nucleotide
  modified_base 5: mod_base = OTHER; note = 2'O-methyl-nucleotide
  modified_base 6: mod_base = OTHER; note = 2'O-methyl-nucleotide
  modified_base 7: mod_base = OTHER; note = 2'O-methyl-nucleotide
  modified_base 8: mod_base = OTHER; note (2R,3R,4R,5R)-2-(2,4-dioxo-3,4-dihydropyrimidin-1(2H)-yl)-4 -hydroxy-5-(hydroxymethyl)tetrahydrofuran-3-yl hexadecylcarbamate nucleotide
  modified_base 9: mod_base = OTHER; note = 2'O-methyl-nucleotide
  modified_base 10: mod_base = OTHER; note = 2'fluoro-nucleotide
  modified_base 11: mod_base = OTHER; note = 2'fluoro-nucleotide
  modified_base 12: mod_base = OTHER; note = 2'fluoro-nucleotide
  modified_base 13: mod_base = OTHER; note = 2'O-methyl-nucleotide
  modified_base 14: mod_base = OTHER; note = 2'O-methyl-nucleotide
  modified_base 15: mod_base = OTHER; note = 2'O-methyl-nucleotide
  modified_base 16: mod_base = OTHER; note = 2'O-methyl-nucleotide
  modified_base 17: mod_base = OTHER; note = 2'O-methyl-nucleotide
  modified_base 18: mod_base = OTHER; note = 2'O-methyl-nucleotide
  modified_base 19: mod_base = OTHER; note = 2'O-methyl-nucleotide
  modified_base 20: mod_base = OTHER; note = 2'O-methyl-nucleotide
  modified_base 21: mod_base = OTHER; note = 2'O-methyl-nucleotide phosphorothioate
  modified_base 22: mod_base = OTHER; note = 2'O-methyl-nucleotide phosphorothioate
  modified_base 23: mod_base = OTHER; note = Inverted abasic nucleotide
ntgcaaatagtctacaaaccaan

SEQ ID NO: 522 - DNA, 21 bp, synthetic construct
  source 1..21: mol_type = other DNA
  modified_base 1: mod_base = OTHER; note = Vinyl phosphonate 2'O-methyl-nucleotide phosphorothioate
  modified_base 2: mod_base = OTHER; note = 2'fluoro-nucleotide phosphorothioate
  modified_base 3: mod_base = OTHER; note = 2'O-methyl-nucleotide
  modified_base 4: mod_base = OTHER; note = 2'O-methyl-nucleotide
  modified_base 6: mod_base = OTHER; note = 2'O-methyl-nucleotide
  modified_base 8: mod_base = OTHER; note = 2'O-methyl-nucleotide
  modified_base 9: mod_base = OTHER; note = 2'O-methyl-nucleotide
  modified_base 10: mod_base = OTHER; note = 2'O-methyl-nucleotide
  modified_base 11: mod_base = OTHER; note = 2'O-methyl-nucleotide
  modified_base 12: mod_base = OTHER; note = 2'O-methyl-nucleotide
  modified_base 13: mod_base = OTHER; note = 2'O-methyl-nucleotide
  modified_base 14: mod_base = OTHER; note = 2'fluoro-nucleotide
  modified_base 15: mod_base = OTHER; note = 2'O-methyl-nucleotide
  modified_base 16: mod_base = OTHER; note = 2'fluoro-nucleotide
  modified_base 17: mod_base = OTHER; note = 2'O-methyl-nucleotide
  modified_base 18: mod_base = OTHER; note = 2'O-methyl-nucleotide
  modified_base 19: mod_base = OTHER; note = 2'O-methyl-nucleotide phosphorothioate
  modified_base 20: mod_base = OTHER; note = 2'O-methyl-nucleotide phosphorothioate
  modified_base 21: mod_base = OTHER; note = 2'O-methyl-nucleotide
  misc_feature 1..4: note = RNA
  misc_feature 5: note = DNA
  misc_feature 6: note = RNA
  misc_feature 7: note = DNA
  misc_feature 8..21: note = RNA
ttggtttgtagactatttgca

SEQ ID NO: 523 - RNA, 23 nt, synthetic construct
  source 1..23: mol_type = other RNA
  modified_base 1: mod_base = OTHER; note = Inverted abasic nucleotide phosphorothioate
  modified_base 2: mod_base = OTHER; note = 2'O-methyl-nucleotide phosphorothioate
  modified_base 3: mod_base = OTHER; note = 2'O-methyl-nucleotide
  modified_base 4: mod_base = OTHER; note = 2'O-methyl-nucleotide
  modified_base 5: mod_base = OTHER; note = 2'O-methyl-nucleotide
  modified_base 6: mod_base = OTHER; note = 2'O-methyl-nucleotide
  modified_base 7: mod_base = OTHER; note = 2'O-methyl-nucleotide
  modified_base 8: mod_base = OTHER; note (2R,3R,4R,5R)-2-(2,4-dioxo-3,4-dihydropyrimidin-1(2H)-yl)-4 -hydroxy-5-(hydroxymethyl)tetrahydrofuran-3-yl hexadecylcarbamate nucleotide
  modified_base 9: mod_base = OTHER; note = 2'O-methyl-nucleotide
  modified_base 10: mod_base = OTHER; note = 2'fluoro-nucleotide
  modified_base 11: mod_base = OTHER; note = 2'fluoro-nucleotide
  modified_base 12: mod_base = OTHER; note = 2'fluoro-nucleotide
  modified_base 13: mod_base = OTHER; note = 2'O-methyl-nucleotide
  modified_base 14: mod_base = OTHER; note = 2'O-methyl-nucleotide
  modified_base 15: mod_base = OTHER; note = 2'O-methyl-nucleotide
  modified_base 16: mod_base = OTHER; note = 2'O-methyl-nucleotide
  modified_base 17: mod_base = OTHER; note = 2'O-methyl-nucleotide
  modified_base 18: mod_base = OTHER; note = 2'O-methyl-nucleotide
  modified_base 19: mod_base = OTHER; note = 2'O-methyl-nucleotide
  modified_base 20: mod_base = OTHER; note = 2'O-methyl-nucleotide
  modified_base 21: mod_base = OTHER; note = 2'O-methyl-nucleotide phosphorothioate
  modified_base 22: mod_base = OTHER; note = 2'O-methyl-nucleotide phosphorothioate
  modified_base 23: mod_base = OTHER; note = Inverted abasic nucleotide
ntgcaaatagtctacaaaccaan

SEQ ID NO: 524 - DNA, 21 bp, synthetic construct
  source 1..21: mol_type = other DNA
  modified_base 1: mod_base = OTHER; note = Vinyl phosphonate 2'O-methyl-nucleotide phosphorothioate
  modified_base 2: mod_base = OTHER; note = 2'fluoro-nucleotide phosphorothioate
  modified_base 3: mod_base = OTHER; note = 2'O-methyl-nucleotide
  modified_base 5: mod_base = OTHER; note = 2'O-methyl-nucleotide
  modified_base 6: mod_base = OTHER; note = 2'O-methyl-nucleotide
  modified_base 7: mod_base = OTHER; note = Unlocked nucleotide
  modified_base 8: mod_base = OTHER; note = 2'O-methyl-nucleotide
  modified_base 9: mod_base = OTHER; note = 2'O-methyl-nucleotide
  modified_base 10: mod_base = OTHER; note = 2'O-methyl-nucleotide
  modified_base 11: mod_base = OTHER; note = 2'O-methyl-nucleotide
  modified_base 12: mod_base = OTHER; note = 2'O-methyl-nucleotide
  modified_base 13: mod_base = OTHER; note = 2'O-methyl-nucleotide
  modified_base 14: mod_base = OTHER; note = 2'fluoro-nucleotide
  modified_base 15: mod_base = OTHER; note = 2'O-methyl-nucleotide
  modified_base 16: mod_base = OTHER; note = 2'fluoro-nucleotide
  modified_base 17: mod_base = OTHER; note = 2'O-methyl-nucleotide
  modified_base 18: mod_base = OTHER; note = 2'O-methyl-nucleotide
  modified_base 19: mod_base = OTHER; note = 2'O-methyl-nucleotide phosphorothioate
  modified_base 20: mod_base = OTHER; note = 2'O-methyl-nucleotide phosphorothioate
  modified_base 21: mod_base = OTHER; note = 2'O-methyl-nucleotide
  misc_feature 1..3: note = RNA
  misc_feature 4: note = DNA
  misc_feature 5..21: note = RNA
ttggtttgtagactatttgca

SEQ ID NO: 525 - RNA, 23 nt, synthetic construct
  source 1..23: mol_type = other RNA
  modified_base 1: mod_base = OTHER; note = Inverted abasic nucleotide phosphorothioate
  modified_base 2: mod_base = OTHER; note = 2'O-methyl-nucleotide phosphorothioate
  modified_base 3: mod_base = OTHER; note = 2'O-methyl-nucleotide
  modified_base 4: mod_base = OTHER; note = 2'O-methyl-nucleotide
  modified_base 5: mod_base = OTHER; note = 2'O-methyl-nucleotide
  modified_base 6: mod_base = OTHER; note = 2'O-methyl-nucleotide
  modified_base 7: mod_base = OTHER; note = 2'O-methyl-nucleotide
  modified_base 8: mod_base = OTHER; note (2R,3R,4R,5R)-2-(2,4-dioxo-3,4-dihydropyrimidin-1(2H)-yl)-4 -hydroxy-5-(hydroxymethyl)tetrahydrofuran-3-yl hexadecylcarbamate nucleotide
  modified_base 9: mod_base = OTHER; note = 2'O-methyl-nucleotide
  modified_base 10: mod_base = OTHER; note = 2'fluoro-nucleotide
  modified_base 11: mod_base = OTHER; note = 2'fluoro-nucleotide
  modified_base 12: mod_base = OTHER; note = 2'fluoro-nucleotide
  modified_base 13: mod_base = OTHER; note = 2'O-methyl-nucleotide
  modified_base 14: mod_base = OTHER; note = 2'O-methyl-nucleotide
  modified_base 15: mod_base = OTHER; note = 2'O-methyl-nucleotide
  modified_base 16: mod_base = OTHER; note = 2'O-methyl-nucleotide
  modified_base 17: mod_base = OTHER; note = 2'O-methyl-nucleotide
  modified_base 18: mod_base = OTHER; note = 2'O-methyl-nucleotide
  modified_base 19: mod_base = OTHER; note = 2'O-methyl-nucleotide
  modified_base 20: mod_base = OTHER; note = 2'O-methyl-nucleotide
  modified_base 21: mod_base = OTHER; note = 2'O-methyl-nucleotide phosphorothioate
  modified_base 22: mod_base = OTHER; note = 2'O-methyl-nucleotide phosphorothioate
  modified_base 23: mod_base = OTHER; note = Inverted abasic nucleotide
ntgcaaatagtctacaaaccaan

SEQ ID NO: 526 - DNA, 21 bp, synthetic construct
  source 1..21: mol_type = other DNA
  modified_base 1: mod_base = OTHER; note = Vinyl phosphonate 2'O-methyl-nucleotide phosphorothioate
  modified_base 2: mod_base = OTHER; note = 2'fluoro-nucleotide phosphorothioate
  modified_base 3: mod_base = OTHER; note = 2'O-methyl-nucleotide
  modified_base 4: mod_base = OTHER; note = 2'O-methyl-nucleotide
  modified_base 5: mod_base = OTHER; note = 2'O-methyl-nucleotide
  modified_base 7: mod_base = OTHER; note = Unlocked nucleotide
  modified_base 8: mod_base = OTHER; note = 2'O-methyl-nucleotide
  modified_base 9: mod_base = OTHER; note = 2'O-methyl-nucleotide
  modified_base 10: mod_base = OTHER; note = 2'O-methyl-nucleotide
  modified_base 11: mod_base = OTHER; note = 2'O-methyl-nucleotide
  modified_base 12: mod_base = OTHER; note = 2'O-methyl-nucleotide
  modified_base 13: mod_base = OTHER; note = 2'O-methyl-nucleotide
  modified_base 14: mod_base = OTHER; note = 2'fluoro-nucleotide
  modified_base 15: mod_base = OTHER; note = 2'O-methyl-nucleotide
  modified_base 16: mod_base = OTHER; note = 2'fluoro-nucleotide
  modified_base 17: mod_base = OTHER; note = 2'O-methyl-nucleotide
  modified_base 18: mod_base = OTHER; note = 2'O-methyl-nucleotide
  modified_base 19: mod_base = OTHER; note = 2'O-methyl-nucleotide phosphorothioate
  modified_base 20: mod_base = OTHER; note = 2'O-methyl-nucleotide phosphorothioate
  modified_base 21: mod_base = OTHER; note = 2'O-methyl-nucleotide
  misc_feature 1..5: note = RNA
  misc_feature 6: note = DNA
  misc_feature 7..21: note = RNA
ttggtttgtagactatttgca

SEQ ID NO: 527 - RNA, 23 nt, synthetic construct
  source 1..23: mol_type = other RNA
  modified_base 1: mod_base = OTHER; note = Inverted abasic nucleotide phosphorothioate
  modified_base 2: mod_base = OTHER; note = 2'O-methyl-nucleotide phosphorothioate
  modified_base 3: mod_base = OTHER; note = 2'O-methyl-nucleotide
  modified_base 4: mod_base = OTHER; note = 2'O-methyl-nucleotide
  modified_base 5: mod_base = OTHER; note = 2'O-methyl-nucleotide
  modified_base 6: mod_base = OTHER; note = 2'O-methyl-nucleotide
  modified_base 7: mod_base = OTHER; note = 2'O-methyl-nucleotide
  modified_base 8: mod_base = OTHER; note (2R,3R,4R,5R)-2-(2,4-dioxo-3,4-dihydropyrimidin-1(2H)-yl)-4 -hydroxy-5-(hydroxymethyl)tetrahydrofuran-3-yl hexadecylcarbamate nucleotide
  modified_base 9: mod_base = OTHER; note = 2'O-methyl-nucleotide
  modified_base 10: mod_base = OTHER; note = 2'fluoro-nucleotide
  modified_base 11: mod_base = OTHER; note = 2'fluoro-nucleotide
  modified_base 12: mod_base = OTHER; note = 2'fluoro-nucleotide
  modified_base 13: mod_base = OTHER; note = 2'O-methyl-nucleotide
  modified_base 14: mod_base = OTHER; note = 2'O-methyl-nucleotide
  modified_base 15: mod_base = OTHER; note = 2'O-methyl-nucleotide
  modified_base 16: mod_base = OTHER; note = 2'O-methyl-nucleotide
  modified_base 17: mod_base = OTHER; note = 2'O-methyl-nucleotide
  modified_base 18: mod_base = OTHER; note = 2'O-methyl-nucleotide
  modified_base 19: mod_base = OTHER; note = 2'O-methyl-nucleotide
  modified_base 20: mod_base = OTHER; note = 2'O-methyl-nucleotide
  modified_base 21: mod_base = OTHER; note = 2'O-methyl-nucleotide phosphorothioate
  modified_base 22: mod_base = OTHER; note = 2'O-methyl-nucleotide phosphorothioate
  modified_base 23: mod_base = OTHER; note = Inverted abasic nucleotide
ntgcaaatagtctacaaaccaan

SEQ ID NO: 528 - DNA, 21 bp, synthetic construct
  source 1..21: mol_type = other DNA
  modified_base 1: mod_base = OTHER; note = Vinyl phosphonate 2'O-methyl-nucleotide phosphorothioate
  modified_base 2: mod_base = OTHER; note = 2'fluoro-nucleotide phosphorothioate
  modified_base 3: mod_base = OTHER; note = 2'O-methyl-nucleotide
  modified_base 5: mod_base = OTHER; note = 2'O-methyl-nucleotide
  modified_base 6: mod_base = OTHER; note = 2'O-methyl-nucleotide
  modified_base 7: mod_base = OTHER; note = Glycol thymidine
  modified_base 8: mod_base = OTHER; note = 2'O-methyl-nucleotide
  modified_base 9: mod_base = OTHER; note = 2'O-methyl-nucleotide
  modified_base 10: mod_base = OTHER; note = 2'O-methyl-nucleotide
  modified_base 11: mod_base = OTHER; note = 2'O-methyl-nucleotide
  modified_base 12: mod_base = OTHER; note = 2'O-methyl-nucleotide
  modified_base 13: mod_base = OTHER; note = 2'O-methyl-nucleotide
  modified_base 14: mod_base = OTHER; note = 2'fluoro-nucleotide
  modified_base 15: mod_base = OTHER; note = 2'O-methyl-nucleotide
  modified_base 16: mod_base = OTHER; note = 2'fluoro-nucleotide
  modified_base 17: mod_base = OTHER; note = 2'O-methyl-nucleotide
  modified_base 18: mod_base = OTHER; note = 2'O-methyl-nucleotide
  modified_base 19: mod_base = OTHER; note = 2'O-methyl-nucleotide phosphorothioate
  modified_base 20: mod_base = OTHER; note = 2'O-methyl-nucleotide phosphorothioate
  modified_base 21: mod_base = OTHER; note = 2'O-methyl-nucleotide
  misc_feature 1..3: note = RNA
  misc_feature 4: note = DNA
  misc_feature 5..21: note = RNA
ttggtttgtagactatttgca

SEQ ID NO: 529 - RNA, 23 nt, synthetic construct
  source 1..23: mol_type = other RNA
  modified_base 1: mod_base = OTHER; note = Inverted abasic nucleotide phosphorothioate
  modified_base 2: mod_base = OTHER; note = 2'O-methyl-nucleotide phosphorothioate
  modified_base 3: mod_base = OTHER; note = 2'O-methyl-nucleotide
  modified_base 4: mod_base = OTHER; note = 2'O-methyl-nucleotide
  modified_base 5: mod_base = OTHER; note = 2'O-methyl-nucleotide
  modified_base 6: mod_base = OTHER; note = 2'O-methyl-nucleotide
  modified_base 7: mod_base = OTHER; note = 2'O-methyl-nucleotide
  modified_base 8: mod_base = OTHER; note (2R,3R,4R,5R)-2-(2,4-dioxo-3,4-dihydropyrimidin-1(2H)-yl)-4 -hydroxy-5-(hydroxymethyl)tetrahydrofuran-3-yl hexadecylcarbamate nucleotide
  modified_base 9: mod_base = OTHER; note = 2'O-methyl-nucleotide
  modified_base 10: mod_base = OTHER; note = 2'fluoro-nucleotide
  modified_base 11: mod_base = OTHER; note = 2'fluoro-nucleotide
  modified_base 12: mod_base = OTHER; note = 2'fluoro-nucleotide
  modified_base 13: mod_base = OTHER; note = 2'O-methyl-nucleotide
  modified_base 14: mod_base = OTHER; note = 2'O-methyl-nucleotide
  modified_base 15: mod_base = OTHER; note = 2'O-methyl-nucleotide
  modified_base 16: mod_base = OTHER; note = 2'O-methyl-nucleotide
  modified_base 17: mod_base = OTHER; note = 2'O-methyl-nucleotide
  modified_base 18: mod_base = OTHER; note = 2'O-methyl-nucleotide
  modified_base 19: mod_base = OTHER; note = 2'O-methyl-nucleotide
  modified_base 20: mod_base = OTHER; note = 2'O-methyl-nucleotide
  modified_base 21: mod_base = OTHER; note = 2'O-methyl-nucleotide phosphorothioate
  modified_base 22: mod_base = OTHER; note = 2'O-methyl-nucleotide phosphorothioate
  modified_base 23: mod_base = OTHER; note = Inverted abasic nucleotide
ntgcaaatagtctacaaaccaan

SEQ ID NO: 530 - DNA, 21 bp, synthetic construct
  source 1..21: mol_type = other DNA
  modified_base 1: mod_base = OTHER; note = Vinyl phosphonate 2'O-methyl-nucleotide phosphorothioate
  modified_base 2: mod_base = OTHER; note = 2'fluoro-nucleotide phosphorothioate
  modified_base 3: mod_base = OTHER; note = 2'O-methyl-nucleotide
  modified_base 4: mod_base = OTHER; note = 2'O-methyl-nucleotide
  modified_base 5: mod_base = OTHER; note = 2'O-methyl-nucleotide
  modified_base 7: mod_base = OTHER; note = Glycol thymidine
  modified_base 8: mod_base = OTHER; note = 2'O-methyl-nucleotide
  modified_base 9: mod_base = OTHER; note = 2'O-methyl-nucleotide
  modified_base 10: mod_base = OTHER; note = 2'O-methyl-nucleotide
  modified_base 11: mod_base = OTHER; note = 2'O-methyl-nucleotide
  modified_base 12: mod_base = OTHER; note = 2'O-methyl-nucleotide
  modified_base 13: mod_base = OTHER; note = 2'O-methyl-nucleotide
  modified_base 14: mod_base = OTHER; note = 2'fluoro-nucleotide
  modified_base 15: mod_base = OTHER; note = 2'O-methyl-nucleotide
  modified_base 16: mod_base = OTHER; note = 2'fluoro-nucleotide
  modified_base 17: mod_base = OTHER; note = 2'O-methyl-nucleotide
  modified_base 18: mod_base = OTHER; note = 2'O-methyl-nucleotide
  modified_base 19: mod_base = OTHER; note = 2'O-methyl-nucleotide phosphorothioate
  modified_base 20: mod_base = OTHER; note = 2'O-methyl-nucleotide phosphorothioate
  modified_base 21: mod_base = OTHER; note = 2'O-methyl-nucleotide
  misc_feature 1..5: note = RNA
  misc_feature 6: note = DNA
  misc_feature 7..21: note = RNA
ttggtttgtagactatttgca

SEQ ID NO: 531 - RNA, 23 nt, synthetic construct
  source 1..23: mol_type = other RNA
  modified_base 1: mod_base = OTHER; note = Inverted abasic nucleotide phosphorothioate
  modified_base 2: mod_base = OTHER; note = 2'O-methyl-nucleotide phosphorothioate
  modified_base 3: mod_base = OTHER; note = 2'O-methyl-nucleotide
  modified_base 4: mod_base = OTHER; note = 2'O-methyl-nucleotide
  modified_base 5: mod_base = OTHER; note = 2'O-methyl-nucleotide
  modified_base 6: mod_base = OTHER; note = 2'O-methyl-nucleotide
  modified_base 7: mod_base = OTHER; note = 2'O-methyl-nucleotide
  modified_base 8: mod_base = OTHER; note (2R,3R,4R,5R)-2-(2,4-dioxo-3,4-dihydropyrimidin-1(2H)-yl)-4 -hydroxy-5-(hydroxymethyl)tetrahydrofuran-3-yl hexadecylcarbamate nucleotide
  modified_base 9: mod_base = OTHER; note = 2'O-methyl-nucleotide
  modified_base 10: mod_base = OTHER; note = 2'fluoro-nucleotide
  modified_base 11: mod_base = OTHER; note = 2'fluoro-nucleotide
  modified_base 12: mod_base = OTHER; note = 2'fluoro-nucleotide
  modified_base 13: mod_base = OTHER; note = 2'O-methyl-nucleotide
  modified_base 14: mod_base = OTHER; note = 2'O-methyl-nucleotide
  modified_base 15: mod_base = OTHER; note = 2'O-methyl-nucleotide
  modified_base 16: mod_base = OTHER; note = 2'O-methyl-nucleotide
  modified_base 17: mod_base = OTHER; note = 2'O-methyl-nucleotide
  modified_base 18: mod_base = OTHER; note = 2'O-methyl-nucleotide
  modified_base 19: mod_base = OTHER; note = 2'O-methyl-nucleotide
  modified_base 20: mod_base = OTHER; note = 2'O-methyl-nucleotide
  modified_base 21: mod_base = OTHER; note = 2'O-methyl-nucleotide phosphorothioate
  modified_base 22: mod_base = OTHER; note = 2'O-methyl-nucleotide phosphorothioate
  modified_base 23: mod_base = OTHER; note = Inverted abasic nucleotide
ntgcaaatagtctacaaaccaan

SEQ ID NO: 532 - DNA, 21 bp, synthetic construct
  source 1..21: mol_type = other DNA
  modified_base 1: mod_base = OTHER; note = Vinyl phosphonate 2'O-methyl-nucleotide phosphorothioate
  modified_base 2: mod_base = OTHER; note = 2'fluoro-nucleotide phosphorothioate
  modified_base 3: mod_base = OTHER; note = 2'O-methyl-nucleotide
  modified_base 5: mod_base = OTHER; note = 2'O-methyl-nucleotide
  modified_base 6: mod_base = OTHER; note = 2'O-methyl-nucleotide
  modified_base 8: mod_base = OTHER; note = 2'O-methyl-nucleotide
  modified_base 9: mod_base = OTHER; note = 2'O-methyl-nucleotide
  modified_base 10: mod_base = OTHER; note = 2'O-methyl-nucleotide
  modified_base 11: mod_base = OTHER; note = 2'O-methyl-nucleotide
  modified_base 12: mod_base = OTHER; note = 2'O-methyl-nucleotide
  modified_base 13: mod_base = OTHER; note = 2'O-methyl-nucleotide
  modified_base 14: mod_base = OTHER; note = 2'fluoro-nucleotide
  modified_base 15: mod_base = OTHER; note = 2'O-methyl-nucleotide
  modified_base 16: mod_base = OTHER; note = 2'fluoro-nucleotide
  modified_base 17: mod_base = OTHER; note = 2'O-methyl-nucleotide
  modified_base 18: mod_base = OTHER; note = 2'O-methyl-nucleotide
  modified_base 19: mod_base = OTHER; note = 2'O-methyl-nucleotide phosphorothioate
  modified_base 20: mod_base = OTHER; note = 2'O-methyl-nucleotide phosphorothioate
  modified_base 21: mod_base = OTHER; note = 2'O-methyl-nucleotide
  misc_feature 1..3: note = RNA
  misc_feature 4: note = DNA
  misc_feature 5..6: note = RNA
  misc_feature 7: note = DNA
  misc_feature 8..21: note = RNA
ttggtttgtagactatttgca

SEQ ID NO: 533 - RNA, 23 nt, synthetic construct
  source 1..23: mol_type = other RNA
  modified_base 1: mod_base = OTHER; note = Inverted abasic nucleotide phosphorothioate
  modified_base 2: mod_base = OTHER; note = 2'O-methyl-nucleotide phosphorothioate
  modified_base 3: mod_base = OTHER; note = 2'O-methyl-nucleotide
  modified_base 4: mod_base = OTHER; note = 2'O-methyl-nucleotide
  modified_base 5: mod_base = OTHER; note = 2'O-methyl-nucleotide
  modified_base 6: mod_base = OTHER; note = 2'O-methyl-nucleotide
  modified_base 7: mod_base = OTHER; note = 2'O-methyl-nucleotide
  modified_base 8: mod_base = OTHER; note (2R,3R,4R,5R)-2-(2,4-dioxo-3,4-dihydropyrimidin-1(2H)-yl)-4 -hydroxy-5-(hydroxymethyl)tetrahydrofuran-3-yl hexadecylcarbamate nucleotide
  modified_base 9: mod_base = OTHER; note = 2'O-methyl-nucleotide
  modified_base 10: mod_base = OTHER; note = 2'fluoro-nucleotide
  modified_base 11: mod_base = OTHER; note = 2'fluoro-nucleotide
  modified_base 12: mod_base = OTHER; note = 2'fluoro-nucleotide
  modified_base 13: mod_base = OTHER; note = 2'O-methyl-nucleotide
  modified_base 14: mod_base = OTHER; note = 2'O-methyl-nucleotide
  modified_base 15: mod_base = OTHER; note = 2'O-methyl-nucleotide
  modified_base 16: mod_base = OTHER; note = 2'O-methyl-nucleotide
  modified_base 17: mod_base = OTHER; note = 2'O-methyl-nucleotide
  modified_base 18: mod_base = OTHER; note = 2'O-methyl-nucleotide
  modified_base 19: mod_base = OTHER; note = 2'O-methyl-nucleotide
  modified_base 20: mod_base = OTHER; note = 2'O-methyl-nucleotide
  modified_base 21: mod_base = OTHER; note = 2'O-methyl-nucleotide phosphorothioate
  modified_base 22: mod_base = OTHER; note = 2'O-methyl-nucleotide phosphorothioate
  modified_base 23: mod_base = OTHER; note = Inverted abasic nucleotide
ntgcaaatagtctacaaaccaan

SEQ ID NO: 534 - DNA, 21 bp, synthetic construct
  source 1..21: mol_type = other DNA
  modified_base 1: mod_base = OTHER; note = Vinyl phosphonate 2'O-methyl-nucleotide phosphorothioate
  modified_base 2: mod_base = OTHER; note = 2'fluoro-nucleotide phosphorothioate
  modified_base 3: mod_base = OTHER; note = 2'O-methyl-nucleotide
  modified_base 4: mod_base = OTHER; note = 2'O-methyl-nucleotide
  modified_base 5: mod_base = OTHER; note = 2'O-methyl-nucleotide
  modified_base 8: mod_base = OTHER; note = 2'O-methyl-nucleotide
  modified_base 9: mod_base = OTHER; note = 2'O-methyl-nucleotide
  modified_base 10: mod_base = OTHER; note = 2'O-methyl-nucleotide
  modified_base 11: mod_base = OTHER; note = 2'O-methyl-nucleotide
  modified_base 12: mod_base = OTHER; note = 2'O-methyl-nucleotide
  modified_base 13: mod_base = OTHER; note = 2'O-methyl-nucleotide
  modified_base 14: mod_base = OTHER; note = 2'fluoro-nucleotide
  modified_base 15: mod_base = OTHER; note = 2'O-methyl-nucleotide
  modified_base 16: mod_base = OTHER; note = 2'fluoro-nucleotide
  modified_base 17: mod_base = OTHER; note = 2'O-methyl-nucleotide
  modified_base 18: mod_base = OTHER; note = 2'O-methyl-nucleotide
  modified_base 19: mod_base = OTHER; note = 2'O-methyl-nucleotide phosphorothioate
  modified_base 20: mod_base = OTHER; note = 2'O-methyl-nucleotide phosphorothioate
  modified_base 21: mod_base = OTHER; note = 2'O-methyl-nucleotide
  misc_feature 1..5: note = RNA
  misc_feature 6..7: note = DNA
  misc_feature 8..21: note = RNA
ttggtttgtagactatttgca

SEQ ID NO: 535 - RNA, 23 nt, synthetic construct
  source 1..23: mol_type = other RNA
  modified_base 1: mod_base = OTHER; note = Inverted abasic nucleotide phosphorothioate
  modified_base 2: mod_base = OTHER; note = 2'O-methyl-nucleotide phosphorothioate
  modified_base 3: mod_base = OTHER; note = 2'O-methyl-nucleotide
  modified_base 4: mod_base = OTHER; note = 2'O-methyl-nucleotide
  modified_base 5: mod_base = OTHER; note = 2'O-methyl-nucleotide
  modified_base 6: mod_base = OTHER; note = 2'O-methyl-nucleotide
  modified_base 7: mod_base = OTHER; note = 2'O-methyl-nucleotide
  modified_base 8: mod_base = OTHER; note (2R,3R,4R,5R)-2-(2,4-dioxo-3,4-dihydropyrimidin-1(2H)-yl)-4 -hydroxy-5-(hydroxymethyl)tetrahydrofuran-3-yl hexadecylcarbamate nucleotide
  modified_base 9: mod_base = OTHER; note = 2'O-methyl-nucleotide
  modified_base 10: mod_base = OTHER; note = 2'fluoro-nucleotide
  modified_base 11: mod_base = OTHER; note = 2'fluoro-nucleotide
  modified_base 12: mod_base = OTHER; note = 2'fluoro-nucleotide
  modified_base 13: mod_base = OTHER; note = 2'O-methyl-nucleotide
  modified_base 14: mod_base = OTHER; note = 2'O-methyl-nucleotide
  modified_base 15: mod_base = OTHER; note = 2'O-methyl-nucleotide
  modified_base 16: mod_base = OTHER; note = 2'O-methyl-nucleotide
  modified_base 17: mod_base = OTHER; note = 2'O-methyl-nucleotide
  modified_base 18: mod_base = OTHER; note = 2'O-methyl-nucleotide
  modified_base 19: mod_base = OTHER; note = 2'O-methyl-nucleotide
  modified_base 20: mod_base = OTHER; note = 2'O-methyl-nucleotide
  modified_base 21: mod_base = OTHER; note = 2'O-methyl-nucleotide phosphorothioate
  modified_base 22: mod_base = OTHER; note = 2'O-methyl-nucleotide phosphorothioate
  modified_base 23: mod_base = OTHER; note = Inverted abasic nucleotide
ntgcaaatagtctacaaaccaan

SEQ ID NO: 536 - DNA, 21 bp, synthetic construct
  source 1..21: mol_type = other DNA
  modified_base 1: mod_base = OTHER; note = Vinyl phosphonate 2'O-methyl-nucleotide phosphorothioate
  modified_base 2: mod_base = OTHER; note = 2'fluoro-nucleotide phosphorothioate
  modified_base 3: mod_base = OTHER; note = 2'O-methyl-nucleotide
  modified_base 4: mod_base = OTHER; note = 2'O-methyl-nucleotide
  modified_base 6: mod_base = OTHER; note = 2'O-methyl-nucleotide
  modified_base 7: mod_base = OTHER; note = Unlocked nucleotide
  modified_base 8: mod_base = OTHER; note = 2'O-methyl-nucleotide
  modified_base 9: mod_base = OTHER; note = 2'O-methyl-nucleotide
  modified_base 10: mod_base = OTHER; note = 2'O-methyl-nucleotide
  modified_base 11: mod_base = OTHER; note = 2'O-methyl-nucleotide
  modified_base 12: mod_base = OTHER; note = 2'O-methyl-nucleotide
  modified_base 13: mod_base = OTHER; note = 2'O-methyl-nucleotide phosphorothioate
  modified_base 14: mod_base = OTHER; note = 2'fluoro-nucleotide
  modified_base 15: mod_base = OTHER; note = 2'O-methyl-nucleotide
  modified_base 16: mod_base = OTHER; note = 2'fluoro-nucleotide
  modified_base 17: mod_base = OTHER; note = 2'O-methyl-nucleotide
  modified_base 18: mod_base = OTHER; note = 2'O-methyl-nucleotide
  modified_base 19: mod_base = OTHER; note = 2'O-methyl-nucleotide phosphorothioate
  modified_base 20: mod_base = OTHER; note = 2'O-methyl-nucleotide phosphorothioate
  modified_base 21: mod_base = OTHER; note = 2'O-methyl-nucleotide
  misc_feature 1..4: note = RNA
  misc_feature 5: note = DNA
  misc_feature 6..21: note = RNA
ttggtttgtagactatttgca

SEQ ID NO: 537 - RNA, 23 nt, synthetic construct
  source 1..23: mol_type = other RNA
  modified_base 1: mod_base = OTHER; note = Inverted abasic nucleotide phosphorothioate
  modified_base 2: mod_base = OTHER; note = 2'O-methyl-nucleotide phosphorothioate
  modified_base 3: mod_base = OTHER; note = 2'O-methyl-nucleotide
  modified_base 4: mod_base = OTHER; note = 2'O-methyl-nucleotide
  modified_base 5: mod_base = OTHER; note = 2'O-methyl-nucleotide
  modified_base 6: mod_base = OTHER; note = 2'O-methyl-nucleotide
  modified_base 7: mod_base = OTHER; note = 2'O-methyl-nucleotide
  modified_base 8: mod_base = OTHER; note (2R,3R,4R,5R)-2-(2,4-dioxo-3,4-dihydropyrimidin-1(2H)-yl)-4 -hydroxy-5-(hydroxymethyl)tetrahydrofuran-3-yl hexadecylcarbamate nucleotide
  modified_base 9: mod_base = OTHER; note = 2'O-methyl-nucleotide
  modified_base 10: mod_base = OTHER; note = 2'fluoro-nucleotide
  modified_base 11: mod_base = OTHER; note = 2'fluoro-nucleotide
  modified_base 12: mod_base = OTHER; note = 2'fluoro-nucleotide
  modified_base 13: mod_base = OTHER; note = 2'O-methyl-nucleotide
  modified_base 14: mod_base = OTHER; note = 2'O-methyl-nucleotide
  modified_base 15: mod_base = OTHER; note = 2'O-methyl-nucleotide
  modified_base 16: mod_base = OTHER; note = 2'O-methyl-nucleotide
  modified_base 17: mod_base = OTHER; note = 2'O-methyl-nucleotide
  modified_base 18: mod_base = OTHER; note = 2'O-methyl-nucleotide
  modified_base 19: mod_base = OTHER; note = 2'O-methyl-nucleotide
  modified_base 20: mod_base = OTHER; note = 2'O-methyl-nucleotide
  modified_base 21: mod_base = OTHER; note = 2'O-methyl-nucleotide phosphorothioate
  modified_base 22: mod_base = OTHER; note = 2'O-methyl-nucleotide phosphorothioate
  modified_base 23: mod_base = OTHER; note = Inverted abasic nucleotide
ntgcaaatagtctacaaaccaan

SEQ ID NO: 538 - DNA, 21 bp, synthetic construct
  source 1..21: mol_type = other DNA
  modified_base 1: mod_base = OTHER; note = Vinyl phosphonate 2'O-methyl-nucleotide phosphorothioate
  modified_base 2: mod_base = OTHER; note = 2'fluoro-nucleotide phosphorothioate
  modified_base 3: mod_base = OTHER; note = 2'O-methyl-nucleotide
  modified_base 4: mod_base = OTHER; note = 2'O-methyl-nucleotide
  modified_base 6: mod_base = OTHER; note = 2'O-methyl-nucleotide
  modified_base 7: mod_base = OTHER; note = Glycol thymidine
  modified_base 8: mod_base = OTHER; note = 2'O-methyl-nucleotide
  modified_base 9: mod_base = OTHER; note = 2'O-methyl-nucleotide
  modified_base 10: mod_base = OTHER; note = 2'O-methyl-nucleotide
  modified_base 11: mod_base = OTHER; note = 2'O-methyl-nucleotide
  modified_base 12: mod_base = OTHER; note = 2'O-methyl-nucleotide
  modified_base 13: mod_base = OTHER; note = 2'O-methyl-nucleotide phosphorothioate
  modified_base 14: mod_base = OTHER; note = 2'fluoro-nucleotide
  modified_base 15: mod_base = OTHER; note = 2'O-methyl-nucleotide
  modified_base 16: mod_base = OTHER; note = 2'fluoro-nucleotide
  modified_base 17: mod_base = OTHER; note = 2'O-methyl-nucleotide
  modified_base 18: mod_base = OTHER; note = 2'O-methyl-nucleotide
  modified_base 19: mod_base = OTHER; note = 2'O-methyl-nucleotide phosphorothioate
  modified_base 20: mod_base = OTHER; note = 2'O-methyl-nucleotide phosphorothioate
  modified_base 21: mod_base = OTHER; note = 2'O-methyl-nucleotide
  misc_feature 1..4: note = RNA
  misc_feature 5: note = DNA
  misc_feature 6..21: note = RNA
ttggtttgtagactatttgca

SEQ ID NO: 539 - RNA, 23 nt, synthetic construct
  source 1..23: mol_type = other RNA
  modified_base 1: mod_base = OTHER; note = Inverted abasic nucleotide phosphorothioate
  modified_base 2: mod_base = OTHER; note = 2'O-methyl-nucleotide phosphorothioate
  modified_base 3: mod_base = OTHER; note = 2'O-methyl-nucleotide
  modified_base 4: mod_base = OTHER; note = 2'O-methyl-nucleotide
  modified_base 5: mod_base = OTHER; note = 2'O-methyl-nucleotide
  modified_base 6: mod_base = OTHER; note = 2'O-methyl-nucleotide
  modified_base 7: mod_base = OTHER; note = 2'O-methyl-nucleotide
  modified_base 8: mod_base = OTHER; note (2R,3R,4R,5R)-2-(2,4-dioxo-3,4-dihydropyrimidin-1(2H)-yl)-4 -hydroxy-5-(hydroxymethyl)tetrahydrofuran-3-yl hexadecylcarbamate nucleotide
  modified_base 9: mod_base = OTHER; note = 2'O-methyl-nucleotide
  modified_base 10: mod_base = OTHER; note = 2'fluoro-nucleotide
  modified_base 11: mod_base = OTHER; note = 2'fluoro-nucleotide
  modified_base 12: mod_base = OTHER; note = 2'fluoro-nucleotide
  modified_base 13: mod_base = OTHER; note = 2'O-methyl-nucleotide
  modified_base 14: mod_base = OTHER; note = 2'O-methyl-nucleotide
  modified_base 15: mod_base = OTHER; note = 2'O-methyl-nucleotide
  modified_base 16: mod_base = OTHER; note = 2'O-methyl-nucleotide
  modified_base 17: mod_base = OTHER; note = 2'O-methyl-nucleotide
  modified_base 18: mod_base = OTHER; note = 2'O-methyl-nucleotide
  modified_base 19: mod_base = OTHER; note = 2'O-methyl-nucleotide
  modified_base 20: mod_base = OTHER; note = 2'O-methyl-nucleotide
  modified_base 21: mod_base = OTHER; note = 2'O-methyl-nucleotide phosphorothioate
  modified_base 22: mod_base = OTHER; note = 2'O-methyl-nucleotide phosphorothioate
  modified_base 23: mod_base = OTHER; note = Inverted abasic nucleotide
ntgcaaatagtctacaaaccaan

SEQ ID NO: 540 - DNA, 21 bp, synthetic construct
  source 1..21: mol_type = other DNA
  modified_base 1: mod_base = OTHER; note = Vinyl phosphonate 2'O-methyl-nucleotide phosphorothioate
  modified_base 2: mod_base = OTHER; note = 2'fluoro-nucleotide phosphorothioate
  modified_base 3: mod_base = OTHER; note = 2'O-methyl-nucleotide
  modified_base 4: mod_base = OTHER; note = 2'O-methyl-nucleotide
  modified_base 6: mod_base = OTHER; note = 2'O-methyl-nucleotide
  modified_base 8: mod_base = OTHER; note = 2'O-methyl-nucleotide
  modified_base 9: mod_base = OTHER; note = 2'O-methyl-nucleotide
  modified_base 10: mod_base = OTHER; note = 2'O-methyl-nucleotide
  modified_base 11: mod_base = OTHER; note = 2'O-methyl-nucleotide
  modified_base 12: mod_base = OTHER; note = 2'O-methyl-nucleotide
  modified_base 13: mod_base = OTHER; note = 2'O-methyl-nucleotide phosphorothioate
  modified_base 14: mod_base = OTHER; note = 2'fluoro-nucleotide
  modified_base 15: mod_base = OTHER; note = 2'O-methyl-nucleotide
  modified_base 16: mod_base = OTHER; note = 2'fluoro-nucleotide
  modified_base 17: mod_base = OTHER; note = 2'O-methyl-nucleotide
  modified_base 18: mod_base = OTHER; note = 2'O-methyl-nucleotide
  modified_base 19: mod_base = OTHER; note = 2'O-methyl-nucleotide phosphorothioate
  modified_base 20: mod_base = OTHER; note = 2'O-methyl-nucleotide phosphorothioate
  modified_base 21: mod_base = OTHER; note = 2'O-methyl-nucleotide
  misc_feature 1..4: note = RNA
  misc_feature 5: note = DNA
  misc_feature 6: note = RNA
  misc_feature 7: note = DNA
  misc_feature 8..21: note = RNA
ttggtttgtagactatttgca

SEQ ID NO: 541 - RNA, 23 nt, synthetic construct
  source 1..23: mol_type = other RNA
  modified_base 1: mod_base = OTHER; note = Inverted abasic nucleotide phosphorothioate
  modified_base 2: mod_base = OTHER; note = 2'O-methyl-nucleotide phosphorothioate
  modified_base 3: mod_base = OTHER; note = 2'O-methyl-nucleotide
  modified_base 4: mod_base = OTHER; note = 2'O-methyl-nucleotide
  modified_base 5: mod_base = OTHER; note = 2'O-methyl-nucleotide
  modified_base 6: mod_base = OTHER; note = 2'O-methyl-nucleotide
  modified_base 7: mod_base = OTHER; note = 2'O-methyl-nucleotide
  modified_base 8: mod_base = OTHER; note (2R,3R,4R,5R)-2-(4-amino-2-oxopyrimidin-1(2H)-yl)-4-hydroxy -5-(hydroxymethyl)tetrahydrofuran-3-yl hexadecylcarbamate nucleotide
  modified_base 9: mod_base = OTHER; note = 2'O-methyl-nucleotide
  modified_base 10: mod_base = OTHER; note = 2'fluoro-nucleotide
  modified_base 11: mod_base = OTHER; note = 2'fluoro-nucleotide
  modified_base 12: mod_base = OTHER; note = 2'fluoro-nucleotide
  modified_base 13: mod_base = OTHER; note = 2'O-methyl-nucleotide
  modified_base 14: mod_base = OTHER; note = 2'O-methyl-nucleotide
  modified_base 15: mod_base = OTHER; note = 2'O-methyl-nucleotide
  modified_base 16: mod_base = OTHER; note = 2'O-methyl-nucleotide
  modified_base 17: mod_base = OTHER; note = 2'O-methyl-nucleotide
  modified_base 18: mod_base = OTHER; note = 2'O-methyl-nucleotide
  modified_base 19: mod_base = OTHER; note = 2'O-methyl-nucleotide
  modified_base 20: mod_base = OTHER; note = 2'O-methyl-nucleotide
  modified_base 21: mod_base = OTHER; note = 2'O-methyl-nucleotide phosphorothioate
  modified_base 22: mod_base = OTHER; note = 2'O-methyl-nucleotide phosphorothioate
  modified_base 23: mod_base = OTHER; note = Inverted abasic nucleotide
ncaagtccaagatcggctccaan

SEQ ID NO: 542 - DNA, 21 bp, synthetic construct
  source 1..21: mol_type = other DNA
  modified_base 1: mod_base = OTHER; note = 5'-cis-cyclobutyl phosphonate-2'-O-methyl-nucleotide phosphorothioate
  modified_base 2: mod_base = OTHER; note = 2'fluoro-nucleotide phosphorothioate
  modified_base 3: mod_base = OTHER; note = 2'O-methyl-nucleotide
  modified_base 4: mod_base = OTHER; note = 2'O-methyl-nucleotide
  modified_base 5: mod_base = OTHER; note = 2'O-methyl-nucleotide
  modified_base 6: mod_base = OTHER; note = 2'O-methyl-nucleotide
  modified_base 8: mod_base = OTHER; note = 2'O-methyl-nucleotide
  modified_base 9: mod_base = OTHER; note = 2'O-methyl-nucleotide
  modified_base 10: mod_base = OTHER; note = 2'O-methyl-nucleotide
  modified_base 11: mod_base = OTHER; note = 2'O-methyl-nucleotide
  modified_base 12: mod_base = OTHER; note = 2'O-methyl-nucleotide
  modified_base 13: mod_base = OTHER; note = 2'O-methyl-nucleotide
  modified_base 14: mod_base = OTHER; note = 2'fluoro-nucleotide
  modified_base 15: mod_base = OTHER; note = 2'O-methyl-nucleotide
  modified_base 16: mod_base = OTHER; note = 2'fluoro-nucleotide
  modified_base 17: mod_base = OTHER; note = 2'O-methyl-nucleotide
  modified_base 18: mod_base = OTHER; note = 2'O-methyl-nucleotide
  modified_base 19: mod_base = OTHER; note = 2'O-methyl-nucleotide phosphorothioate
  modified_base 20: mod_base = OTHER; note = 2'O-methyl-nucleotide phosphorothioate
  modified_base 21: mod_base = OTHER; note = 2'O-methyl-nucleotide
  misc_feature 1..6: note = RNA
  misc_feature 7: note = DNA
  misc_feature 8..21: note = RNA
ttggagccgatcttggacttg

SEQ ID NO: 543 - RNA, 23 nt, synthetic construct
  source 1..23: mol_type = other RNA
  modified_base 1: mod_base = OTHER; note = Inverted abasic nucleotide phosphorothioate
  modified_base 2: mod_base = OTHER; note = 2'O-methyl-nucleotide phosphorothioate
  modified_base 3: mod_base = OTHER; note = 2'O-methyl-nucleotide
  modified_base 4: mod_base = OTHER; note = 2'O-methyl-nucleotide
  modified_base 5: mod_base = OTHER; note = 2'O-methyl-nucleotide
  modified_base 6: mod_base = OTHER; note = 2'O-methyl-nucleotide
  modified_base 7: mod_base = OTHER; note = 2'O-methyl-nucleotide
  modified_base 8: mod_base = OTHER; note (2R,3R,4R,5R)-2-(4-amino-2-oxopyrimidin-1(2H)-yl)-4-hydroxy -5-(hydroxymethyl)tetrahydrofuran-3-yl hexadecylcarbamate nucleotide
  modified_base 9: mod_base = OTHER; note = 2'O-methyl-nucleotide
  modified_base 10: mod_base = OTHER; note = 2'fluoro-nucleotide
  modified_base 11: mod_base = OTHER; note = 2'fluoro-nucleotide
  modified_base 12: mod_base = OTHER; note = 2'fluoro-nucleotide
  modified_base 13: mod_base = OTHER; note = 2'O-methyl-nucleotide
  modified_base 14: mod_base = OTHER; note = 2'O-methyl-nucleotide
  modified_base 15: mod_base = OTHER; note = 2'O-methyl-nucleotide
  modified_base 16: mod_base = OTHER; note = 2'O-methyl-nucleotide
  modified_base 17: mod_base = OTHER; note = 2'O-methyl-nucleotide
  modified_base 18: mod_base = OTHER; note = 2'O-methyl-nucleotide
  modified_base 19: mod_base = OTHER; note = 2'O-methyl-nucleotide
  modified_base 20: mod_base = OTHER; note = 2'O-methyl-nucleotide
  modified_base 21: mod_base = OTHER; note = 2'O-methyl-nucleotide phosphorothioate
  modified_base 22: mod_base = OTHER; note = 2'O-methyl-nucleotide phosphorothioate
  modified_base 23: mod_base = OTHER; note = Inverted abasic nucleotide
ncaagtccaagatcggctccaan

SEQ ID NO: 544 - DNA, 21 bp, synthetic construct
  source 1..21: mol_type = other DNA
  modified_base 1: mod_base = OTHER; note = Vinyl phosphonate 2'O-methyl-nucleotide phosphorothioate
  modified_base 2: mod_base = OTHER; note = 2'fluoro-nucleotide phosphorothioate
  modified_base 3: mod_base = OTHER; note = 2'O-methyl-nucleotide
  modified_base 4: mod_base = OTHER; note = 2'O-methyl-nucleotide
  modified_base 6: mod_base = OTHER; note = 2'O-methyl-nucleotide
  modified_base 7: mod_base = OTHER; note = Unlocked nucleotide
  modified_base 8: mod_base = OTHER; note = 2'O-methyl-nucleotide
  modified_base 9: mod_base = OTHER; note = 2'O-methyl-nucleotide
  modified_base 10: mod_base = OTHER; note = 2'O-methyl-nucleotide
  modified_base 11: mod_base = OTHER; note = 2'O-methyl-nucleotide
  modified_base 12: mod_base = OTHER; note = 2'O-methyl-nucleotide
  modified_base 13: mod_base = OTHER; note = 2'O-methyl-nucleotide
  modified_base 14: mod_base = OTHER; note = 2'fluoro-nucleotide
  modified_base 15: mod_base = OTHER; note = 2'O-methyl-nucleotide
  modified_base 16: mod_base = OTHER; note = 2'fluoro-nucleotide
  modified_base 17: mod_base = OTHER; note = 2'O-methyl-nucleotide
  modified_base 18: mod_base = OTHER; note = 2'O-methyl-nucleotide
  modified_base 19: mod_base = OTHER; note = 2'O-methyl-nucleotide phosphorothioate
  modified_base 20: mod_base = OTHER; note = 2'O-methyl-nucleotide phosphorothioate
  modified_base 21: mod_base = OTHER; note = 2'O-methyl-nucleotide
  misc_feature 1..4: note = RNA
  misc_feature 5: note = DNA
  misc_feature 6..21: note = RNA
ttggagccgatcttggacttg

SEQ ID NO: 545 - RNA, 23 nt, synthetic construct
  source 1..23: mol_type = other RNA
  modified_base 1: mod_base = OTHER; note = Inverted abasic nucleotide phosphorothioate
  modified_base 2: mod_base = OTHER; note = 2'O-methyl-nucleotide phosphorothioate
  modified_base 3: mod_base = OTHER; note = 2'O-methyl-nucleotide
  modified_base 4: mod_base = OTHER; note = 2'O-methyl-nucleotide
  modified_base 5: mod_base = OTHER; note = 2'O-methyl-nucleotide
  modified_base 6: mod_base = OTHER; note = 2'O-methyl-nucleotide
  modified_base 7: mod_base = OTHER; note = 2'O-methyl-nucleotide
  modified_base 8: mod_base = OTHER; note (2R,3R,4R,5R)-2-(4-amino-2-oxopyrimidin-1(2H)-yl)-4-hydroxy -5-(hydroxymethyl)tetrahydrofuran-3-yl hexadecylcarbamate nucleotide
  modified_base 9: mod_base = OTHER; note = 2'O-methyl-nucleotide
  modified_base 10: mod_base = OTHER; note = 2'fluoro-nucleotide
  modified_base 11: mod_base = OTHER; note = 2'fluoro-nucleotide
  modified_base 12: mod_base = OTHER; note = 2'fluoro-nucleotide
  modified_base 13: mod_base = OTHER; note = 2'O-methyl-nucleotide
  modified_base 14: mod_base = OTHER; note = 2'O-methyl-nucleotide
  modified_base 15: mod_base = OTHER; note = 2'O-methyl-nucleotide
  modified_base 16: mod_base = OTHER; note = 2'O-methyl-nucleotide
  modified_base 17: mod_base = OTHER; note = 2'O-methyl-nucleotide
  modified_base 18: mod_base = OTHER; note = 2'O-methyl-nucleotide
  modified_base 19: mod_base = OTHER; note = 2'O-methyl-nucleotide
  modified_base 20: mod_base = OTHER; note = 2'O-methyl-nucleotide
  modified_base 21: mod_base = OTHER; note = 2'O-methyl-nucleotide phosphorothioate
  modified_base 22: mod_base = OTHER; note = 2'O-methyl-nucleotide phosphorothioate
  modified_base 23: mod_base = OTHER; note = Inverted abasic nucleotide
ncaagtccaagatcggctccaan

SEQ ID NO: 546 - DNA, 21 bp, synthetic construct
  source 1..21: mol_type = other DNA
  modified_base 1: mod_base = OTHER; note = Vinyl phosphonate 2'O-methyl-nucleotide phosphorothioate
  modified_base 2: mod_base = OTHER; note = 2'fluoro-nucleotide phosphorothioate
  modified_base 3: mod_base = OTHER; note = 2'O-methyl-nucleotide
  modified_base 4: mod_base = OTHER; note = 2'O-methyl-nucleotide
  modified_base 6: mod_base = OTHER; note = 2'O-methyl-nucleotide
  modified_base 7: mod_base = OTHER; note = Glycol nucleotide
  modified_base 8: mod_base = OTHER; note = 2'O-methyl-nucleotide
  modified_base 9: mod_base = OTHER; note = 2'O-methyl-nucleotide
  modified_base 10: mod_base = OTHER; note = 2'O-methyl-nucleotide
  modified_base 11: mod_base = OTHER; note = 2'O-methyl-nucleotide
  modified_base 12: mod_base = OTHER; note = 2'O-methyl-nucleotide
  modified_base 13: mod_base = OTHER; note = 2'O-methyl-nucleotide
  modified_base 14: mod_base = OTHER; note = 2'fluoro-nucleotide
  modified_base 15: mod_base = OTHER; note = 2'O-methyl-nucleotide
  modified_base 16: mod_base = OTHER; note = 2'fluoro-nucleotide
  modified_base 17: mod_base = OTHER; note = 2'O-methyl-nucleotide
  modified_base 18: mod_base = OTHER; note = 2'O-methyl-nucleotide
  modified_base 19: mod_base = OTHER; note = 2'O-methyl-nucleotide phosphorothioate
  modified_base 20: mod_base = OTHER; note = 2'O-methyl-nucleotide phosphorothioate
  modified_base 21: mod_base = OTHER; note = 2'O-methyl-nucleotide
  misc_feature 1..4: note = RNA
  misc_feature 5: note = DNA
  misc_feature 6..21: note = RNA
ttggagccgatcttggacttg

SEQ ID NO: 547 - RNA, 23 nt, synthetic construct
  source 1..23: mol_type = other RNA
  modified_base 1: mod_base = OTHER; note = Inverted abasic nucleotide phosphorothioate
  modified_base 2: mod_base = OTHER; note = 2'O-methyl-nucleotide phosphorothioate
  modified_base 3: mod_base = OTHER; note = 2'O-methyl-nucleotide
  modified_base 4: mod_base = OTHER; note = 2'O-methyl-nucleotide
  modified_base 5: mod_base = OTHER; note = 2'O-methyl-nucleotide
  modified_base 6: mod_base = OTHER; note = 2'O-methyl-nucleotide
  modified_base 7: mod_base = OTHER; note = 2'O-methyl-nucleotide
  modified_base 8: mod_base = OTHER; note (2R,3R,4R,5R)-2-(4-amino-2-oxopyrimidin-1(2H)-yl)-4-hydroxy -5-(hydroxymethyl)tetrahydrofuran-3-yl hexadecylcarbamate nucleotide
  modified_base 9: mod_base = OTHER; note = 2'O-methyl-nucleotide
  modified_base 10: mod_base = OTHER; note = 2'fluoro-nucleotide
  modified_base 11: mod_base = OTHER; note = 2'fluoro-nucleotide
  modified_base 12: mod_base = OTHER; note = 2'fluoro-nucleotide
  modified_base 13: mod_base = OTHER; note = 2'O-methyl-nucleotide
  modified_base 14: mod_base = OTHER; note = 2'O-methyl-nucleotide
  modified_base 15: mod_base = OTHER; note = 2'O-methyl-nucleotide
  modified_base 16: mod_base = OTHER; note = 2'O-methyl-nucleotide
  modified_base 17: mod_base = OTHER; note = 2'O-methyl-nucleotide
  modified_base 18: mod_base = OTHER; note = 2'O-methyl-nucleotide
  modified_base 19: mod_base = OTHER; note = 2'O-methyl-nucleotide
  modified_base 20: mod_base = OTHER; note = 2'O-methyl-nucleotide
  modified_base 21: mod_base = OTHER; note = 2'O-methyl-nucleotide phosphorothioate
  modified_base 22: mod_base = OTHER; note = 2'O-methyl-nucleotide phosphorothioate
  modified_base 23: mod_base = OTHER; note = Inverted abasic nucleotide
ncaagtccaagatcggctccaan

SEQ ID NO: 548 - DNA, 21 bp, synthetic construct
  source 1..21: mol_type = other DNA
  modified_base 1: mod_base = OTHER; note = Vinyl phosphonate 2'O-methyl-nucleotide phosphorothioate
  modified_base 2: mod_base = OTHER; note = 2'fluoro-nucleotide phosphorothioate
  modified_base 3: mod_base = OTHER; note = 2'O-methyl-nucleotide
  modified_base 4: mod_base = OTHER; note = 2'O-methyl-nucleotide
  modified_base 6: mod_base = OTHER; note = 2'O-methyl-nucleotide
  modified_base 8: mod_base = OTHER; note = 2'O-methyl-nucleotide
  modified_base 9: mod_base = OTHER; note = 2'O-methyl-nucleotide
  modified_base 10: mod_base = OTHER; note = 2'O-methyl-nucleotide
  modified_base 11: mod_base = OTHER; note = 2'O-methyl-nucleotide
  modified_base 12: mod_base = OTHER; note = 2'O-methyl-nucleotide
  modified_base 13: mod_base = OTHER; note = 2'O-methyl-nucleotide
  modified_base 14: mod_base = OTHER; note = 2'fluoro-nucleotide
  modified_base 15: mod_base = OTHER; note = 2'O-methyl-nucleotide
  modified_base 16: mod_base = OTHER; note = 2'fluoro-nucleotide
  modified_base 17: mod_base = OTHER; note = 2'O-methyl-nucleotide
  modified_base 18: mod_base = OTHER; note = 2'O-methyl-nucleotide
  modified_base 19: mod_base = OTHER; note = 2'O-methyl-nucleotide phosphorothioate
  modified_base 20: mod_base = OTHER; note = 2'O-methyl-nucleotide phosphorothioate
  modified_base 21: mod_base = OTHER; note = 2'O-methyl-nucleotide
  misc_feature 1..4: note = RNA
  misc_feature 5: note = DNA
  misc_feature 6: note = RNA
  misc_feature 7: note = DNA
  misc_feature 8..21: note = RNA
ttggagccgatcttggacttg

SEQ ID NO: 549 - RNA, 23 nt, synthetic construct
  source 1..23: mol_type = other RNA
  modified_base 1: mod_base = OTHER; note = Inverted abasic nucleotide phosphorothioate
  modified_base 2: mod_base = OTHER; note = 2'O-methyl-nucleotide phosphorothioate
  modified_base 3: mod_base = OTHER; note = 2'O-methyl-nucleotide
  modified_base 4: mod_base = OTHER; note = 2'O-methyl-nucleotide
  modified_base 5: mod_base = OTHER; note = 2'O-methyl-nucleotide
  modified_base 6: mod_base = OTHER; note = 2'O-methyl-nucleotide
  modified_base 7: mod_base = OTHER; note = 2'O-methyl-nucleotide
  modified_base 8: mod_base = OTHER; note (2R,3R,4R,5R)-2-(4-amino-2-oxopyrimidin-1(2H)-yl)-4-hydroxy -5-(hydroxymethyl)tetrahydrofuran-3-yl hexadecylcarbamate nucleotide
  modified_base 9: mod_base = OTHER; note = 2'O-methyl-nucleotide
  modified_base 10: mod_base = OTHER; note = 2'fluoro-nucleotide
  modified_base 11: mod_base = OTHER; note = 2'fluoro-nucleotide
  modified_base 12: mod_base = OTHER; note = 2'fluoro-nucleotide
  modified_base 13: mod_base = OTHER; note = 2'O-methyl-nucleotide
  modified_base 14: mod_base = OTHER; note = 2'O-methyl-nucleotide
  modified_base 15: mod_base = OTHER; note = 2'O-methyl-nucleotide
  modified_base 16: mod_base = OTHER; note = 2'O-methyl-nucleotide
  modified_base 17: mod_base = OTHER; note = 2'O-methyl-nucleotide
  modified_base 18: mod_base = OTHER; note = 2'O-methyl-nucleotide
  modified_base 19: mod_base = OTHER; note = 2'O-methyl-nucleotide
  modified_base 20: mod_base = OTHER; note = 2'O-methyl-nucleotide
  modified_base 21: mod_base = OTHER; note = 2'O-methyl-nucleotide phosphorothioate
  modified_base 22: mod_base = OTHER; note = 2'O-methyl-nucleotide phosphorothioate
  modified_base 23: mod_base = OTHER; note = Inverted abasic nucleotide
ncaagtccaagatcggctccaan

SEQ ID NO: 550 - DNA, 21 bp, synthetic construct
  source 1..21: mol_type = other DNA
  modified_base 1: mod_base = OTHER; note = Vinyl phosphonate 2'O-methyl-nucleotide phosphorothioate
  modified_base 2: mod_base = OTHER; note = 2'fluoro-nucleotide phosphorothioate
  modified_base 3: mod_base = OTHER; note = 2'O-methyl-nucleotide
  modified_base 5: mod_base = OTHER; note = 2'O-methyl-nucleotide
  modified_base 6: mod_base = OTHER; note = 2'O-methyl-nucleotide
  modified_base 7: mod_base = OTHER; note = Unlocked nucleotide
  modified_base 8: mod_base = OTHER; note = 2'O-methyl-nucleotide
  modified_base 9: mod_base = OTHER; note = 2'O-methyl-nucleotide
  modified_base 10: mod_base = OTHER; note = 2'O-methyl-nucleotide
  modified_base 11: mod_base = OTHER; note = 2'O-methyl-nucleotide
  modified_base 12: mod_base = OTHER; note = 2'O-methyl-nucleotide
  modified_base 13: mod_base = OTHER; note = 2'O-methyl-nucleotide
  modified_base 14: mod_base = OTHER; note = 2'fluoro-nucleotide
  modified_base 15: mod_base = OTHER; note = 2'O-methyl-nucleotide
  modified_base 16: mod_base = OTHER; note = 2'fluoro-nucleotide
  modified_base 17: mod_base = OTHER; note = 2'O-methyl-nucleotide
  modified_base 18: mod_base = OTHER; note = 2'O-methyl-nucleotide
  modified_base 19: mod_base = OTHER; note = 2'O-methyl-nucleotide phosphorothioate
  modified_base 20: mod_base = OTHER; note = 2'O-methyl-nucleotide phosphorothioate
  modified_base 21: mod_base = OTHER; note = 2'O-methyl-nucleotide
  misc_feature 1..3: note = RNA
  misc_feature 4: note = DNA
  misc_feature 5..21: note = RNA
ttggagccgatcttggacttg

SEQ ID NO: 551 - RNA, 23 nt, synthetic construct
  source 1..23: mol_type = other RNA
  modified_base 1: mod_base = OTHER; note = Inverted abasic nucleotide phosphorothioate
  modified_base 2: mod_base = OTHER; note = 2'O-methyl-nucleotide phosphorothioate
  modified_base 3: mod_base = OTHER; note = 2'O-methyl-nucleotide
  modified_base 4: mod_base = OTHER; note = 2'O-methyl-nucleotide
  modified_base 5: mod_base = OTHER; note = 2'O-methyl-nucleotide
  modified_base 6: mod_base = OTHER; note = 2'O-methyl-nucleotide
  modified_base 7: mod_base = OTHER; note = 2'O-methyl-nucleotide
  modified_base 8: mod_base = OTHER; note (2R,3R,4R,5R)-2-(4-amino-2-oxopyrimidin-1(2H)-yl)-4-hydroxy -5-(hydroxymethyl)tetrahydrofuran-3-yl hexadecylcarbamate nucleotide
  modified_base 9: mod_base = OTHER; note = 2'O-methyl-nucleotide
  modified_base 10: mod_base = OTHER; note = 2'fluoro-nucleotide
  modified_base 11: mod_base = OTHER; note = 2'fluoro-nucleotide
  modified_base 12: mod_base = OTHER; note = 2'fluoro-nucleotide
  modified_base 13: mod_base = OTHER; note = 2'O-methyl-nucleotide
  modified_base 14: mod_base = OTHER; note = 2'O-methyl-nucleotide
  modified_base 15: mod_base = OTHER; note = 2'O-methyl-nucleotide
  modified_base 16: mod_base = OTHER; note = 2'O-methyl-nucleotide
  modified_base 17: mod_base = OTHER; note = 2'O-methyl-nucleotide
  modified_base 18: mod_base = OTHER; note = 2'O-methyl-nucleotide
  modified_base 19: mod_base = OTHER; note = 2'O-methyl-nucleotide
  modified_base 20: mod_base = OTHER; note = 2'O-methyl-nucleotide
  modified_base 21: mod_base = OTHER; note = 2'O-methyl-nucleotide phosphorothioate
  modified_base 22: mod_base = OTHER; note = 2'O-methyl-nucleotide phosphorothioate
  modified_base 23: mod_base = OTHER; note = Inverted abasic nucleotide
ncaagtccaagatcggctccaan

SEQ ID NO: 552 - DNA, 21 bp, synthetic construct
  source 1..21: mol_type = other DNA
  modified_base 1: mod_base = OTHER; note = Vinyl phosphonate 2'O-methyl-nucleotide phosphorothioate
  modified_base 2: mod_base = OTHER; note = 2'fluoro-nucleotide phosphorothioate
  modified_base 3: mod_base = OTHER; note = 2'O-methyl-nucleotide
  modified_base 4: mod_base = OTHER; note = 2'O-methyl-nucleotide
  modified_base 5: mod_base = OTHER; note = 2'O-methyl-nucleotide
  modified_base 7: mod_base = OTHER; note = Unlocked nucleotide
  modified_base 8: mod_base = OTHER; note = 2'O-methyl-nucleotide
  modified_base 9: mod_base = OTHER; note = 2'O-methyl-nucleotide
  modified_base 10: mod_base = OTHER; note = 2'O-methyl-nucleotide
  modified_base 11: mod_base = OTHER; note = 2'O-methyl-nucleotide
  modified_base 12: mod_base = OTHER; note = 2'O-methyl-nucleotide
  modified_base 13: mod_base = OTHER; note = 2'O-methyl-nucleotide
  modified_base 14: mod_base = OTHER; note = 2'fluoro-nucleotide
  modified_base 15: mod_base = OTHER; note = 2'O-methyl-nucleotide
  modified_base 16: mod_base = OTHER; note = 2'fluoro-nucleotide
  modified_base 17: mod_base = OTHER; note = 2'O-methyl-nucleotide
  modified_base 18: mod_base = OTHER; note = 2'O-methyl-nucleotide
  modified_base 19: mod_base = OTHER; note = 2'O-methyl-nucleotide phosphorothioate
  modified_base 20: mod_base = OTHER; note = 2'O-methyl-nucleotide phosphorothioate
  modified_base 21: mod_base = OTHER; note = 2'O-methyl-nucleotide
  misc_feature 1..5: note = RNA
  misc_feature 6: note = DNA
  misc_feature 7..21: note = RNA
ttggagccgatcttggacttg

SEQ ID NO: 553 - RNA, 23 nt, synthetic construct
  source 1..23: mol_type = other RNA
  modified_base 1: mod_base = OTHER; note = Inverted abasic nucleotide phosphorothioate
  modified_base 2: mod_base = OTHER; note = 2'O-methyl-nucleotide phosphorothioate
  modified_base 3: mod_base = OTHER; note = 2'O-methyl-nucleotide
  modified_base 4: mod_base = OTHER; note = 2'O-methyl-nucleotide
  modified_base 5: mod_base = OTHER; note = 2'O-methyl-nucleotide
  modified_base 6: mod_base = OTHER; note = 2'O-methyl-nucleotide
  modified_base 7: mod_base = OTHER; note = 2'O-methyl-nucleotide
  modified_base 8: mod_base = OTHER; note (2R,3R,4R,5R)-2-(4-amino-2-oxopyrimidin-1(2H)-yl)-4-hydroxy -5-(hydroxymethyl)tetrahydrofuran-3-yl hexadecylcarbamate nucleotide
  modified_base 9: mod_base = OTHER; note = 2'O-methyl-nucleotide
  modified_base 10: mod_base = OTHER; note = 2'fluoro-nucleotide
  modified_base 11: mod_base = OTHER; note = 2'fluoro-nucleotide
  modified_base 12: mod_base = OTHER; note = 2'fluoro-nucleotide
  modified_base 13: mod_base = OTHER; note = 2'O-methyl-nucleotide
  modified_base 14: mod_base = OTHER; note = 2'O-methyl-nucleotide
  modified_base 15: mod_base = OTHER; note = 2'O-methyl-nucleotide
  modified_base 16: mod_base = OTHER; note = 2'O-methyl-nucleotide
  modified_base 17: mod_base = OTHER; note = 2'O-methyl-nucleotide
  modified_base 18: mod_base = OTHER; note = 2'O-methyl-nucleotide
  modified_base 19: mod_base = OTHER; note = 2'O-methyl-nucleotide
  modified_base 20: mod_base = OTHER; note = 2'O-methyl-nucleotide
  modified_base 21: mod_base = OTHER; note = 2'O-methyl-nucleotide phosphorothioate
  modified_base 22: mod_base = OTHER; note = 2'O-methyl-nucleotide phosphorothioate
  modified_base 23: mod_base = OTHER; note = Inverted abasic nucleotide
ncaagtccaagatcggctccaan

SEQ ID NO: 554 - DNA, 21 bp, synthetic construct
  source 1..21: mol_type = other DNA
  modified_base 1: mod_base = OTHER; note = Vinyl phosphonate 2'O-methyl-nucleotide phosphorothioate
  modified_base 2: mod_base = OTHER; note = 2'fluoro-nucleotide phosphorothioate
  modified_base 3: mod_base = OTHER; note = 2'O-methyl-nucleotide
  modified_base 5: mod_base = OTHER; note = 2'O-methyl-nucleotide
  modified_base 6: mod_base = OTHER; note = 2'O-methyl-nucleotide
  modified_base 7: mod_base = OTHER; note = Glycol nucleotide
  modified_base 8: mod_base = OTHER; note = 2'O-methyl-nucleotide
  modified_base 9: mod_base = OTHER; note = 2'O-methyl-nucleotide
  modified_base 10: mod_base = OTHER; note = 2'O-methyl-nucleotide
  modified_base 11: mod_base = OTHER; note = 2'O-methyl-nucleotide
  modified_base 12: mod_base = OTHER; note = 2'O-methyl-nucleotide
  modified_base 13: mod_base = OTHER; note = 2'O-methyl-nucleotide
  modified_base 14: mod_base = OTHER; note = 2'fluoro-nucleotide
  modified_base 15: mod_base = OTHER; note = 2'O-methyl-nucleotide
  modified_base 16: mod_base = OTHER; note = 2'fluoro-nucleotide
  modified_base 17: mod_base = OTHER; note = 2'O-methyl-nucleotide
  modified_base 18: mod_base = OTHER; note = 2'O-methyl-nucleotide
  modified_base 19: mod_base = OTHER; note = 2'O-methyl-nucleotide phosphorothioate
  modified_base 20: mod_base = OTHER; note = 2'O-methyl-nucleotide phosphorothioate
  modified_base 21: mod_base = OTHER; note = 2'O-methyl-nucleotide
  misc_feature 1..3: note = RNA
  misc_feature 4: note = DNA
  misc_feature 5..21: note = RNA
ttggagccgatcttggacttg

SEQ ID NO: 555 - RNA, 23 nt, synthetic construct
  source 1..23: mol_type = other RNA
  modified_base 1: mod_base = OTHER; note = Inverted abasic nucleotide phosphorothioate
  modified_base 2: mod_base = OTHER; note = 2'O-methyl-nucleotide phosphorothioate
  modified_base 3: mod_base = OTHER; note = 2'O-methyl-nucleotide
  modified_base 4: mod_base = OTHER; note = 2'O-methyl-nucleotide
  modified_base 5: mod_base = OTHER; note = 2'O-methyl-nucleotide
  modified_base 6: mod_base = OTHER; note = 2'O-methyl-nucleotide
  modified_base 7: mod_base = OTHER; note = 2'O-methyl-nucleotide
  modified_base 8: mod_base = OTHER; note (2R,3R,4R,5R)-2-(4-amino-2-oxopyrimidin-1(2H)-yl)-4-hydroxy -5-(hydroxymethyl)tetrahydrofuran-3-yl hexadecylcarbamate nucleotide
  modified_base 9: mod_base = OTHER; note = 2'O-methyl-nucleotide
  modified_base 10: mod_base = OTHER; note = 2'fluoro-nucleotide
  modified_base 11: mod_base = OTHER; note = 2'fluoro-nucleotide
  modified_base 12: mod_base = OTHER; note = 2'fluoro-nucleotide
  modified_base 13: mod_base = OTHER; note = 2'O-methyl-nucleotide
  modified_base 14: mod_base = OTHER; note = 2'O-methyl-nucleotide
  modified_base 15: mod_base = OTHER; note = 2'O-methyl-nucleotide
  modified_base 16: mod_base = OTHER; note = 2'O-methyl-nucleotide
  modified_base 17: mod_base = OTHER; note = 2'O-methyl-nucleotide
  modified_base 18: mod_base = OTHER; note = 2'O-methyl-nucleotide
  modified_base 19: mod_base = OTHER; note = 2'O-methyl-nucleotide
  modified_base 20: mod_base = OTHER; note = 2'O-methyl-nucleotide
  modified_base 21: mod_base = OTHER; note = 2'O-methyl-nucleotide phosphorothioate
  modified_base 22: mod_base = OTHER; note = 2'O-methyl-nucleotide phosphorothioate
  modified_base 23: mod_base = OTHER; note = Inverted abasic nucleotide
ncaagtccaagatcggctccaan

SEQ ID NO: 556 - DNA, 21 bp, synthetic construct
  source 1..21: mol_type = other DNA
  modified_base 1: mod_base = OTHER; note = Vinyl phosphonate 2'O-methyl-nucleotide phosphorothioate
  modified_base 2: mod_base = OTHER; note = 2'fluoro-nucleotide phosphorothioate
  modified_base 3: mod_base = OTHER; note = 2'O-methyl-nucleotide
  modified_base 4: mod_base = OTHER; note = 2'O-methyl-nucleotide
  modified_base 5: mod_base = OTHER; note = 2'O-methyl-nucleotide
  modified_base 7: mod_base = OTHER; note = Glycol nucleotide
  modified_base 8: mod_base = OTHER; note = 2'O-methyl-nucleotide
  modified_base 9: mod_base = OTHER; note = 2'O-methyl-nucleotide
  modified_base 10: mod_base = OTHER; note = 2'O-methyl-nucleotide
  modified_base 11: mod_base = OTHER; note = 2'O-methyl-nucleotide
  modified_base 12: mod_base = OTHER; note = 2'O-methyl-nucleotide
  modified_base 13: mod_base = OTHER; note = 2'O-methyl-nucleotide
  modified_base 14: mod_base = OTHER; note = 2'fluoro-nucleotide
  modified_base 15: mod_base = OTHER; note = 2'O-methyl-nucleotide
  modified_base 16: mod_base = OTHER; note = 2'fluoro-nucleotide
  modified_base 17: mod_base = OTHER; note = 2'O-methyl-nucleotide
  modified_base 18: mod_base = OTHER; note = 2'O-methyl-nucleotide
  modified_base 19: mod_base = OTHER; note = 2'O-methyl-nucleotide phosphorothioate
  modified_base 20: mod_base = OTHER; note = 2'O-methyl-nucleotide phosphorothioate
  modified_base 21: mod_base = OTHER; note = 2'O-methyl-nucleotide
  misc_feature 1..5: note = RNA
  misc_feature 6: note = DNA
  misc_feature 7..21: note = RNA
ttggagccgatcttggacttg

SEQ ID NO: 557 - RNA, 23 nt, synthetic construct
  source 1..23: mol_type = other RNA
  modified_base 1: mod_base = OTHER; note = Inverted abasic nucleotide phosphorothioate
  modified_base 2: mod_base = OTHER; note = 2'O-methyl-nucleotide phosphorothioate
  modified_base 3: mod_base = OTHER; note = 2'O-methyl-nucleotide
  modified_base 4: mod_base = OTHER; note = 2'O-methyl-nucleotide
  modified_base 5: mod_base = OTHER; note = 2'O-methyl-nucleotide
  modified_base 6: mod_base = OTHER; note = 2'O-methyl-nucleotide
  modified_base 7: mod_base = OTHER; note = 2'O-methyl-nucleotide
  modified_base 8: mod_base = OTHER; note (2R,3R,4R,5R)-2-(4-amino-2-oxopyrimidin-1(2H)-yl)-4-hydroxy -5-(hydroxymethyl)tetrahydrofuran-3-yl hexadecylcarbamate nucleotide
  modified_base 9: mod_base = OTHER; note = 2'O-methyl-nucleotide
  modified_base 10: mod_base = OTHER; note = 2'fluoro-nucleotide
  modified_base 11: mod_base = OTHER; note = 2'fluoro-nucleotide
  modified_base 12: mod_base = OTHER; note = 2'fluoro-nucleotide
  modified_base 13: mod_base = OTHER; note = 2'O-methyl-nucleotide
  modified_base 14: mod_base = OTHER; note = 2'O-methyl-nucleotide
  modified_base 15: mod_base = OTHER; note = 2'O-methyl-nucleotide
  modified_base 16: mod_base = OTHER; note = 2'O-methyl-nucleotide
  modified_base 17: mod_base = OTHER; note = 2'O-methyl-nucleotide
  modified_base 18: mod_base = OTHER; note = 2'O-methyl-nucleotide
  modified_base 19: mod_base = OTHER; note = 2'O-methyl-nucleotide
  modified_base 20: mod_base = OTHER; note = 2'O-methyl-nucleotide
  modified_base 21: mod_base = OTHER; note = 2'O-methyl-nucleotide phosphorothioate
  modified_base 22: mod_base = OTHER; note = 2'O-methyl-nucleotide phosphorothioate
  modified_base 23: mod_base = OTHER; note = Inverted abasic nucleotide
ncaagtccaagatcggctccaan

SEQ ID NO: 558 - DNA, 21 bp, synthetic construct
  source 1..21: mol_type = other DNA
  modified_base 1: mod_base = OTHER; note = Vinyl phosphonate 2'O-methyl-nucleotide phosphorothioate
  modified_base 2: mod_base = OTHER; note = 2'fluoro-nucleotide phosphorothioate
  modified_base 3: mod_base = OTHER; note = 2'O-methyl-nucleotide
  modified_base 5: mod_base = OTHER; note = 2'O-methyl-nucleotide
  modified_base 6: mod_base = OTHER; note = 2'O-methyl-nucleotide
  modified_base 8: mod_base = OTHER; note = 2'O-methyl-nucleotide
  modified_base 9: mod_base = OTHER; note = 2'O-methyl-nucleotide
  modified_base 10: mod_base = OTHER; note = 2'O-methyl-nucleotide
  modified_base 11: mod_base = OTHER; note = 2'O-methyl-nucleotide
  modified_base 12: mod_base = OTHER; note = 2'O-methyl-nucleotide
  modified_base 13: mod_base = OTHER; note = 2'O-methyl-nucleotide
  modified_base 14: mod_base = OTHER; note = 2'fluoro-nucleotide
  modified_base 15: mod_base = OTHER; note = 2'O-methyl-nucleotide
  modified_base 16: mod_base = OTHER; note = 2'fluoro-nucleotide
  modified_base 17: mod_base = OTHER; note = 2'O-methyl-nucleotide
  modified_base 18: mod_base = OTHER; note = 2'O-methyl-nucleotide
  modified_base 19: mod_base = OTHER; note = 2'O-methyl-nucleotide phosphorothioate
  modified_base 20: mod_base = OTHER; note = 2'O-methyl-nucleotide phosphorothioate
  modified_base 21: mod_base = OTHER; note = 2'O-methyl-nucleotide
  misc_feature 1..3: note = RNA
  misc_feature 4: note = DNA
  misc_feature 5..6: note = RNA
  misc_feature 7: note = DNA
  misc_feature 8..21: note = RNA
ttggagccgatcttggacttg

SEQ ID NO: 559 - RNA, 23 nt, synthetic construct
  source 1..23: mol_type = other RNA
  modified_base 1: mod_base = OTHER; note = Inverted abasic nucleotide phosphorothioate
  modified_base 2: mod_base = OTHER; note = 2'O-methyl-nucleotide phosphorothioate
  modified_base 3: mod_base = OTHER; note = 2'O-methyl-nucleotide
  modified_base 4: mod_base = OTHER; note = 2'O-methyl-nucleotide
  modified_base 5: mod_base = OTHER; note = 2'O-methyl-nucleotide
  modified_base 6: mod_base = OTHER; note = 2'O-methyl-nucleotide
  modified_base 7: mod_base = OTHER; note = 2'O-methyl-nucleotide
  modified_base 8: mod_base = OTHER; note (2R,3R,4R,5R)-2-(4-amino-2-oxopyrimidin-1(2H)-yl)-4-hydroxy -5-(hydroxymethyl)tetrahydrofuran-3-yl hexadecylcarbamate nucleotide
  modified_base 9: mod_base = OTHER; note = 2'O-methyl-nucleotide
  modified_base 10: mod_base = OTHER; note = 2'fluoro-nucleotide
  modified_base 11: mod_base = OTHER; note = 2'fluoro-nucleotide
  modified_base 12: mod_base = OTHER; note = 2'fluoro-nucleotide
  modified_base 13: mod_base = OTHER; note = 2'O-methyl-nucleotide
  modified_base 14: mod_base = OTHER; note = 2'O-methyl-nucleotide
  modified_base 15: mod_base = OTHER; note = 2'O-methyl-nucleotide
  modified_base 16: mod_base = OTHER; note = 2'O-methyl-nucleotide
  modified_base 17: mod_base = OTHER; note = 2'O-methyl-nucleotide
  modified_base 18: mod_base = OTHER; note = 2'O-methyl-nucleotide
  modified_base 19: mod_base = OTHER; note = 2'O-methyl-nucleotide
  modified_base 20: mod_base = OTHER; note = 2'O-methyl-nucleotide
  modified_base 21: mod_base = OTHER; note = 2'O-methyl-nucleotide phosphorothioate
  modified_base 22: mod_base = OTHER; note = 2'O-methyl-nucleotide phosphorothioate
  modified_base 23: mod_base = OTHER; note = Inverted abasic nucleotide
ncaagtccaagatcggctccaan

SEQ ID NO: 560 - DNA, 21 bp, synthetic construct
  source 1..21: mol_type = other DNA
  modified_base 1: mod_base = OTHER; note = Vinyl phosphonate 2'O-methyl-nucleotide phosphorothioate
  modified_base 2: mod_base = OTHER; note = 2'fluoro-nucleotide phosphorothioate
  modified_base 3: mod_base = OTHER; note = 2'O-methyl-nucleotide
  modified_base 4: mod_base = OTHER; note = 2'O-methyl-nucleotide
  modified_base 5: mod_base = OTHER; note = 2'O-methyl-nucleotide
  modified_base 8: mod_base = OTHER; note = 2'O-methyl-nucleotide
  modified_base 9: mod_base = OTHER; note = 2'O-methyl-nucleotide
  modified_base 10: mod_base = OTHER; note = 2'O-methyl-nucleotide
  modified_base 11: mod_base = OTHER; note = 2'O-methyl-nucleotide
  modified_base 12: mod_base = OTHER; note = 2'O-methyl-nucleotide
  modified_base 13: mod_base = OTHER; note = 2'O-methyl-nucleotide
  modified_base 14: mod_base = OTHER; note = 2'fluoro-nucleotide
  modified_base 15: mod_base = OTHER; note = 2'O-methyl-nucleotide
  modified_base 16: mod_base = OTHER; note = 2'fluoro-nucleotide
  modified_base 17: mod_base = OTHER; note = 2'O-methyl-nucleotide
  modified_base 18: mod_base = OTHER; note = 2'O-methyl-nucleotide
  modified_base 19: mod_base = OTHER; note = 2'O-methyl-nucleotide phosphorothioate
  modified_base 20: mod_base = OTHER; note = 2'O-methyl-nucleotide phosphorothioate
  modified_base 21: mod_base = OTHER; note = 2'O-methyl-nucleotide
  misc_feature 1..5: note = RNA
  misc_feature 6..7: note = DNA
  misc_feature 8..21: note = RNA
ttggagccgatcttggacttg

SEQ ID NO: 561 - RNA, 23 nt, synthetic construct
  source 1..23: mol_type = other RNA
  modified_base 1: mod_base = OTHER; note = Inverted abasic nucleotide phosphorothioate
  modified_base 2: mod_base = OTHER; note = 2'O-methyl-nucleotide phosphorothioate
  modified_base 3: mod_base = OTHER; note = 2'O-methyl-nucleotide
  modified_base 4: mod_base = OTHER; note = 2'O-methyl-nucleotide
  modified_base 5: mod_base = OTHER; note = 2'O-methyl-nucleotide
  modified_base 6: mod_base = OTHER; note = 2'O-methyl-nucleotide
  modified_base 7: mod_base = OTHER; note = 2'O-methyl-nucleotide
  modified_base 8: mod_base = OTHER; note (2R,3R,4R,5R)-2-(4-amino-2-oxopyrimidin-1(2H)-yl)-4-hydroxy -5-(hydroxymethyl)tetrahydrofuran-3-yl hexadecylcarbamate nucleotide
  modified_base 9: mod_base = OTHER; note = 2'O-methyl-nucleotide
  modified_base 10: mod_base = OTHER; note = 2'fluoro-nucleotide
  modified_base 11: mod_base = OTHER; note = 2'fluoro-nucleotide
  modified_base 12: mod_base = OTHER; note = 2'fluoro-nucleotide
  modified_base 13: mod_base = OTHER; note = 2'O-methyl-nucleotide
  modified_base 14: mod_base = OTHER; note = 2'O-methyl-nucleotide
  modified_base 15: mod_base = OTHER; note = 2'O-methyl-nucleotide
  modified_base 16: mod_base = OTHER; note = 2'O-methyl-nucleotide
  modified_base 17: mod_base = OTHER; note = 2'O-methyl-nucleotide
  modified_base 18: mod_base = OTHER; note = 2'O-methyl-nucleotide
  modified_base 19: mod_base = OTHER; note = 2'O-methyl-nucleotide
  modified_base 20: mod_base = OTHER; note = 2'O-methyl-nucleotide
  modified_base 21: mod_base = OTHER; note = 2'O-methyl-nucleotide phosphorothioate
  modified_base 22: mod_base = OTHER; note = 2'O-methyl-nucleotide phosphorothioate
  modified_base 23: mod_base = OTHER; note = Inverted abasic nucleotide
ncaagtccaagatcggctccaan

SEQ ID NO: 562 - DNA, 21 bp, synthetic construct
  source 1..21: mol_type = other DNA
  modified_base 1: mod_base = OTHER; note = Vinyl phosphonate 2'O-methyl-nucleotide phosphorothioate
  modified_base 2: mod_base = OTHER; note = 2'fluoro-nucleotide phosphorothioate
  modified_base 3: mod_base = OTHER; note = 2'O-methyl-nucleotide
  modified_base 4: mod_base = OTHER; note = 2'O-methyl-nucleotide
  modified_base 6: mod_base = OTHER; note = 2'O-methyl-nucleotide
  modified_base 7: mod_base = OTHER; note = Unlocked nucleotide
  modified_base 8: mod_base = OTHER; note = 2'O-methyl-nucleotide
  modified_base 9: mod_base = OTHER; note = 2'O-methyl-nucleotide
  modified_base 10: mod_base = OTHER; note = 2'O-methyl-nucleotide
  modified_base 11: mod_base = OTHER; note = 2'O-methyl-nucleotide
  modified_base 12: mod_base = OTHER; note = 2'O-methyl-nucleotide
  modified_base 13: mod_base = OTHER; note = 2'O-methyl-nucleotide phosphorothioate
  modified_base 14: mod_base = OTHER; note = 2'fluoro-nucleotide
  modified_base 15: mod_base = OTHER; note = 2'O-methyl-nucleotide
  modified_base 16: mod_base = OTHER; note = 2'fluoro-nucleotide
  modified_base 17: mod_base = OTHER; note = 2'O-methyl-nucleotide
  modified_base 18: mod_base = OTHER; note = 2'O-methyl-nucleotide
  modified_base 19: mod_base = OTHER; note = 2'O-methyl-nucleotide phosphorothioate
  modified_base 20: mod_base = OTHER; note = 2'O-methyl-nucleotide phosphorothioate
  modified_base 21: mod_base = OTHER; note = 2'O-methyl-nucleotide
  misc_feature 1..4: note = RNA
  misc_feature 5: note = DNA
  misc_feature 6..21: note = RNA
ttggagccgatcttggacttg

SEQ ID NO: 563 - RNA, 23 nt, synthetic construct
  source 1..23: mol_type = other RNA
  modified_base 1: mod_base = OTHER; note = Inverted abasic nucleotide phosphorothioate
  modified_base 2: mod_base = OTHER; note = 2'O-methyl-nucleotide phosphorothioate
  modified_base 3: mod_base = OTHER; note = 2'O-methyl-nucleotide
  modified_base 4: mod_base = OTHER; note = 2'O-methyl-nucleotide
  modified_base 5: mod_base = OTHER; note = 2'O-methyl-nucleotide
  modified_base 6: mod_base = OTHER; note = 2'O-methyl-nucleotide
  modified_base 7: mod_base = OTHER; note = 2'O-methyl-nucleotide
  modified_base 8: mod_base = OTHER; note (2R,3R,4R,5R)-2-(4-amino-2-oxopyrimidin-1(2H)-yl)-4-hydroxy -5-(hydroxymethyl)tetrahydrofuran-3-yl hexadecylcarbamate nucleotide
  modified_base 9: mod_base = OTHER; note = 2'O-methyl-nucleotide
  modified_base 10: mod_base = OTHER; note = 2'fluoro-nucleotide
  modified_base 11: mod_base = OTHER; note = 2'fluoro-nucleotide
  modified_base 12: mod_base = OTHER; note = 2'fluoro-nucleotide
  modified_base 13: mod_base = OTHER; note = 2'O-methyl-nucleotide
  modified_base 14: mod_base = OTHER; note = 2'O-methyl-nucleotide
  modified_base 15: mod_base = OTHER; note = 2'O-methyl-nucleotide
  modified_base 16: mod_base = OTHER; note = 2'O-methyl-nucleotide
  modified_base 17: mod_base = OTHER; note = 2'O-methyl-nucleotide
  modified_base 18: mod_base = OTHER; note = 2'O-methyl-nucleotide
  modified_base 19: mod_base = OTHER; note = 2'O-methyl-nucleotide
  modified_base 20: mod_base = OTHER; note = 2'O-methyl-nucleotide
  modified_base 21: mod_base = OTHER; note = 2'O-methyl-nucleotide phosphorothioate
  modified_base 22: mod_base = OTHER; note = 2'O-methyl-nucleotide phosphorothioate
  modified_base 23: mod_base = OTHER; note = Inverted abasic nucleotide
ncaagtccaagatcggctccaan

SEQ ID NO: 564 - DNA, 21 bp, synthetic construct
  source 1..21: mol_type = other DNA
  modified_base 1: mod_base = OTHER; note = Vinyl phosphonate 2'O-methyl-nucleotide phosphorothioate
  modified_base 2: mod_base = OTHER; note = 2'fluoro-nucleotide phosphorothioate
  modified_base 3: mod_base = OTHER; note = 2'O-methyl-nucleotide
  modified_base 4: mod_base = OTHER; note = 2'O-methyl-nucleotide
  modified_base 6: mod_base = OTHER; note = 2'O-methyl-nucleotide
  modified_base 7: mod_base = OTHER; note = Glycol nucleotide
  modified_base 8: mod_base = OTHER; note = 2'O-methyl-nucleotide
  modified_base 9: mod_base = OTHER; note = 2'O-methyl-nucleotide
  modified_base 10: mod_base = OTHER; note = 2'O-methyl-nucleotide
  modified_base 11: mod_base = OTHER; note = 2'O-methyl-nucleotide
  modified_base 12: mod_base = OTHER; note = 2'O-methyl-nucleotide
  modified_base 13: mod_base = OTHER; note = 2'O-methyl-nucleotide phosphorothioate
  modified_base 14: mod_base = OTHER; note = 2'fluoro-nucleotide
  modified_base 15: mod_base = OTHER; note = 2'O-methyl-nucleotide
  modified_base 16: mod_base = OTHER; note = 2'fluoro-nucleotide
  modified_base 17: mod_base = OTHER; note = 2'O-methyl-nucleotide
  modified_base 18: mod_base = OTHER; note = 2'O-methyl-nucleotide
  modified_base 19: mod_base = OTHER; note = 2'O-methyl-nucleotide phosphorothioate
  modified_base 20: mod_base = OTHER; note = 2'O-methyl-nucleotide phosphorothioate
  modified_base 21: mod_base = OTHER; note = 2'O-methyl-nucleotide
  misc_feature 1..4: note = RNA
  misc_feature 5: note = DNA
  misc_feature 6..21: note = RNA
ttggagccgatcttggacttg

SEQ ID NO: 565 - RNA, 23 nt, synthetic construct
  source 1..23: mol_type = other RNA
  modified_base 1: mod_base = OTHER; note = Inverted abasic nucleotide phosphorothioate
  modified_base 2: mod_base = OTHER; note = 2'O-methyl-nucleotide phosphorothioate
  modified_base 3: mod_base = OTHER; note = 2'O-methyl-nucleotide
  modified_base 4: mod_base = OTHER; note = 2'O-methyl-nucleotide
  modified_base 5: mod_base = OTHER; note = 2'O-methyl-nucleotide
  modified_base 6: mod_base = OTHER; note = 2'O-methyl-nucleotide
  modified_base 7: mod_base = OTHER; note = 2'O-methyl-nucleotide
  modified_base 8: mod_base = OTHER; note (2R,3R,4R,5R)-2-(4-amino-2-oxopyrimidin-1(2H)-yl)-4-hydroxy -5-(hydroxymethyl)tetrahydrofuran-3-yl hexadecylcarbamate nucleotide
  modified_base 9: mod_base = OTHER; note = 2'O-methyl-nucleotide
  modified_base 10: mod_base = OTHER; note = 2'fluoro-nucleotide
  modified_base 11: mod_base = OTHER; note = 2'fluoro-nucleotide
  modified_base 12: mod_base = OTHER; note = 2'fluoro-nucleotide
  modified_base 13: mod_base = OTHER; note = 2'O-methyl-nucleotide
  modified_base 14: mod_base = OTHER; note = 2'O-methyl-nucleotide
  modified_base 15: mod_base = OTHER; note = 2'O-methyl-nucleotide
  modified_base 16: mod_base = OTHER; note = 2'O-methyl-nucleotide
  modified_base 17: mod_base = OTHER; note = 2'O-methyl-nucleotide
  modified_base 18: mod_base = OTHER; note = 2'O-methyl-nucleotide
  modified_base 19: mod_base = OTHER; note = 2'O-methyl-nucleotide
  modified_base 20: mod_base = OTHER; note = 2'O-methyl-nucleotide
  modified_base 21: mod_base = OTHER; note = 2'O-methyl-nucleotide phosphorothioate
  modified_base 22: mod_base = OTHER; note = 2'O-methyl-nucleotide phosphorothioate
  modified_base 23: mod_base = OTHER; note = Inverted abasic nucleotide
ncaagtccaagatcggctccaan

SEQ ID NO: 566 - DNA, 21 bp, synthetic construct
  source 1..21: mol_type = other DNA
  modified_base 1: mod_base = OTHER; note = Vinyl phosphonate 2'O-methyl-nucleotide phosphorothioate
  modified_base 2: mod_base = OTHER; note = 2'fluoro-nucleotide phosphorothioate
  modified_base 3: mod_base = OTHER; note = 2'O-methyl-nucleotide
  modified_base 4: mod_base = OTHER; note = 2'O-methyl-nucleotide
  modified_base 6: mod_base = OTHER; note = 2'O-methyl-nucleotide
  modified_base 8: mod_base = OTHER; note = 2'O-methyl-nucleotide
  modified_base 9: mod_base = OTHER; note = 2'O-methyl-nucleotide
  modified_base 10: mod_base = OTHER; note = 2'O-methyl-nucleotide
  modified_base 11: mod_base = OTHER; note = 2'O-methyl-nucleotide
  modified_base 12: mod_base = OTHER; note = 2'O-methyl-nucleotide
  modified_base 13: mod_base = OTHER; note = 2'O-methyl-nucleotide phosphorothioate
  modified_base 14: mod_base = OTHER; note = 2'fluoro-nucleotide
  modified_base 15: mod_base = OTHER; note = 2'O-methyl-nucleotide
  modified_base 16: mod_base = OTHER; note = 2'fluoro-nucleotide
  modified_base 17: mod_base = OTHER; note = 2'O-methyl-nucleotide
  modified_base 18: mod_base = OTHER; note = 2'O-methyl-nucleotide
  modified_base 19: mod_base = OTHER; note = 2'O-methyl-nucleotide phosphorothioate
  modified_base 20: mod_base = OTHER; note = 2'O-methyl-nucleotide phosphorothioate
  modified_base 21: mod_base = OTHER; note = 2'O-methyl-nucleotide
  misc_feature 1..4: note = RNA
  misc_feature 5: note = DNA
  misc_feature 6: note = RNA
  misc_feature 7: note = DNA
  misc_feature 8..21: note = RNA
ttggagccgatcttggacttg

SEQ ID NO: 567 - RNA, 22 nt, synthetic construct
  source 1..22: mol_type = other RNA
  modified_base 1: mod_base = OTHER; note = Inverted abasic nucleotide phosphorothioate
  modified_base 2: mod_base = OTHER; note = 2'O-methyl-nucleotide phosphorothioate
  modified_base 3: mod_base = OTHER; note = 2'O-methyl-nucleotide
  modified_base 4: mod_base = OTHER; note = 2'O-methyl-nucleotide
  modified_base 5: mod_base = OTHER; note = 2'O-methyl-nucleotide
  modified_base 6: mod_base = OTHER; note = 2'O-methyl-nucleotide
  modified_base 7: mod_base = OTHER; note (2R,3R,4R,5R)-2-(6-amino-9H-purin-9-yl)-4-hydroxy-5-(hydrox ymethyl)tetrahydrofuran-3-yl hexadecylcarbamate nucleotide
  modified_base 8: mod_base = OTHER; note = 2'fluoro-nucleotide
  modified_base 9: mod_base = OTHER; note = 2'O-methyl-nucleotide
  modified_base 10: mod_base = OTHER; note = 2'fluoro-nucleotide
  modified_base 11: mod_base = OTHER; note = 2'fluoro-nucleotide
  modified_base 12: mod_base = OTHER; note = 2'fluoro-nucleotide
  modified_base 13: mod_base = OTHER; note = 2'O-methyl-nucleotide
  modified_base 14: mod_base = OTHER; note = 2'O-methyl-nucleotide
  modified_base 15: mod_base = OTHER; note = 2'O-methyl-nucleotide
  modified_base 16: mod_base = OTHER; note = 2'O-methyl-nucleotide
  modified_base 17: mod_base = OTHER; note = 2'O-methyl-nucleotide
  modified_base 18: mod_base = OTHER; note = 2'O-methyl-nucleotide
  modified_base 19: mod_base = OTHER; note = 2'O-methyl-nucleotide
  modified_base 20: mod_base = OTHER; note = 2'O-methyl-nucleotide phosphorothioate
  modified_base 21: mod_base = OTHER; note = 2'O-methyl-nucleotide phosphorothioate
  modified_base 22: mod_base = OTHER; note = 2'O-methyl-nucleotide
ntgcaaatagtctacaaaccaa

SEQ ID NO: 568 - DNA, 23 bp, synthetic construct
  source 1..23: mol_type = other DNA
  modified_base 1: mod_base = OTHER; note = 5'-cis-cyclobutyl phosphonate-2'-O-methyl-nucleotide phosphorothioate
  modified_base 2: mod_base = OTHER; note = 2'fluoro-nucleotide phosphorothioate
  modified_base 3: mod_base = OTHER; note = 2'O-methyl-nucleotide
  modified_base 4: mod_base = OTHER; note = 2'O-methyl-nucleotide
  modified_base 6: mod_base = OTHER; note = 2'O-methyl-nucleotide
  modified_base 8: mod_base = OTHER; note = 2'O-methyl-nucleotide
  modified_base 9: mod_base = OTHER; note = 2'O-methyl-nucleotide
  modified_base 10: mod_base = OTHER; note = 2'O-methyl-nucleotide
  modified_base 11: mod_base = OTHER; note = 2'O-methyl-nucleotide
  modified_base 12: mod_base = OTHER; note = 2'O-methyl-nucleotide
  modified_base 13: mod_base = OTHER; note = 2'O-methyl-nucleotide
  modified_base 14: mod_base = OTHER; note = 2'fluoro-nucleotide
  modified_base 15: mod_base = OTHER; note = 2'O-methyl-nucleotide
  modified_base 16: mod_base = OTHER; note = 2'fluoro-nucleotide
  modified_base 17: mod_base = OTHER; note = 2'O-methyl-nucleotide
  modified_base 18: mod_base = OTHER; note = 2'O-methyl-nucleotide
  modified_base 19: mod_base = OTHER; note = 2'O-methyl-nucleotide
  modified_base 20: mod_base = OTHER; note = 2'O-methyl-nucleotide
  modified_base 21: mod_base = OTHER; note = 2'O-methyl-nucleotide phosphorothioate
  modified_base 22: mod_base = OTHER; note = 2'O-methyl-nucleotide phosphorothioate
  modified_base 23: mod_base = OTHER; note = 2'O-methyl-nucleotide
  misc_feature 1..4: note = RNA
  misc_feature 5: note = DNA
  misc_feature 6: note = RNA
  misc_feature 7: note = DNA
  misc_feature 8..23: note = RNA
ttggtttgtagactatttgcaca

SEQ ID NO: 569 - RNA, 23 nt, synthetic construct
  source 1..23: mol_type = other RNA
  modified_base 1: mod_base = OTHER; note = Inverted abasic nucleotide phosphorothioate
  modified_base 2: mod_base = OTHER; note = 2'O-methyl-nucleotide phosphorothioate
  modified_base 3: mod_base = OTHER; note = 2'O-methyl-nucleotide
  modified_base 4: mod_base = OTHER; note = 2'O-methyl-nucleotide
  modified_base 5: mod_base = OTHER; note = 2'O-methyl-nucleotide
  modified_base 6: mod_base = OTHER; note = 2'O-methyl-nucleotide
  modified_base 7: mod_base = OTHER; note = 2'O-methyl-nucleotide
  modified_base 8: mod_base = OTHER; note (2R,3R,4R,5R)-2-(4-amino-2-oxopyrimidin-1(2H)-yl)-4-hydroxy -5-(hydroxymethyl)tetrahydrofuran-3-yl hexadecylcarbamate nucleotide
  modified_base 9: mod_base = OTHER; note = 2'O-methyl-nucleotide
  modified_base 10: mod_base = OTHER; note = 2'fluoro-nucleotide
  modified_base 11: mod_base = OTHER; note = 2'fluoro-nucleotide
  modified_base 12: mod_base = OTHER; note = 2'fluoro-nucleotide
  modified_base 13: mod_base = OTHER; note = 2'O-methyl-nucleotide
  modified_base 14: mod_base = OTHER; note = 2'O-methyl-nucleotide
  modified_base 15: mod_base = OTHER; note = 2'O-methyl-nucleotide
  modified_base 16: mod_base = OTHER; note = 2'O-methyl-nucleotide
  modified_base 17: mod_base = OTHER; note = 2'O-methyl-nucleotide
  modified_base 18: mod_base = OTHER; note = 2'O-methyl-nucleotide
  modified_base 19: mod_base = OTHER; note = 2'O-methyl-nucleotide
  modified_base 20: mod_base = OTHER; note = 2'O-methyl-nucleotide
  modified_base 21: mod_base = OTHER; note = 2'O-methyl-nucleotide phosphorothioate
  modified_base 22: mod_base = OTHER; note = 2'O-methyl-nucleotide phosphorothioate
  modified_base 23: mod_base = OTHER; note = Inverted abasic nucleotide
ncaagtccaagatcggctccaan

SEQ ID NO: 570 - DNA, 21 bp, synthetic construct
  source 1..21: mol_type = other DNA
  modified_base 1: mod_base = OTHER; note = 5'-cis-cyclobutyl phosphonate-2'-O-methyl-nucleotide phosphorothioate
  modified_base 2: mod_base = OTHER; note = 2'fluoro-nucleotide phosphorothioate
  modified_base 3: mod_base = OTHER; note = 2'O-methyl-nucleotide
  modified_base 4: mod_base = OTHER; note = 2'O-methyl-nucleotide
  modified_base 6: mod_base = OTHER; note = 2'O-methyl-nucleotide
  modified_base 8: mod_base = OTHER; note = 2'O-methyl-nucleotide
  modified_base 9: mod_base = OTHER; note = 2'O-methyl-nucleotide
  modified_base 10: mod_base = OTHER; note = 2'O-methyl-nucleotide
  modified_base 11: mod_base = OTHER; note = 2'O-methyl-nucleotide
  modified_base 12: mod_base = OTHER; note = 2'O-methyl-nucleotide
  modified_base 13: mod_base = OTHER; note = 2'O-methyl-nucleotide
  modified_base 14: mod_base = OTHER; note = 2'fluoro-nucleotide
  modified_base 15: mod_base = OTHER; note = 2'O-methyl-nucleotide
  modified_base 16: mod_base = OTHER; note = 2'fluoro-nucleotide
  modified_base 17: mod_base = OTHER; note = 2'O-methyl-nucleotide
  modified_base 18: mod_base = OTHER; note = 2'O-methyl-nucleotide
  modified_base 19: mod_base = OTHER; note = 2'O-methyl-nucleotide phosphorothioate
  modified_base 20: mod_base = OTHER; note = 2'O-methyl-nucleotide phosphorothioate
  modified_base 21: mod_base = OTHER; note = 2'O-methyl-nucleotide
  misc_feature 1..4: note = RNA
  misc_feature 5: note = DNA
  misc_feature 6: note = RNA
  misc_feature 7: note = DNA
  misc_feature 8..21: note = RNA
ttggagccgatcttggacttg